(19) United States
(12) Patent Application Publication
(10) Pub. No.: US 2004/0048249 A1
(43) Pub. Date: Mar. 11, 2004

(54) Novel nucleic acids and secreted polypeptides

(76) Inventors: Y. Tom Tang, San Jose, CA (US); Yonghong Yang, San Jose, CA (US); Gezhi Weng, Piedmont, CA (US); Jie Zhang, Campbell, CA (US); Feiyan Ren, Cupertino, CA (US); Aidong Xue, Sunnyvale, CA (US); Jian-Rui Wang, Cupertino, CA (US); Tom Wehrman, Stanford, CA (US); Malabika J. Ghosh, Sunnyvale, CA (US); Dunrui Wang, Poway, CA (US); Qing A. Zhao, San Jose, CA (US); Zhiwei Wang, Sunnyvale, CA (US)

Correspondence Address: Luisa Biogornia, HYSEQ, INC., 670 Almanor Avenue, Sunnyvale, CA, 94085, US

(21) Appl. No.: 10/112,944

(22) Filed: Mar. 28, 2002

Related U.S. Application Data
(63) Continuation-in-part of application No. 09/488,725, filed on Jan. 21, 2000.
(63) Continuation-in-part of application No. 09/491,404, filed on Jan. 25, 2000, now abandoned.
(63) Continuation-in-part of application No. 09/496,914, filed on Feb. 3, 2000, now abandoned.
(63) Continuation-in-part of application No. 09/515,126, filed on Feb. 28, 2000, now abandoned.
(63) Continuation-in-part of application No. 09/519,705, filed on Mar. 7, 2000, now abandoned.
(63) Continuation-in-part of application No. 09/540,217, filed on Mar. 31, 2000, now abandoned.
(63) Continuation-in-part of application No. 09/552,929, filed on Apr. 18, 2000, now abandoned.
(63) Continuation-in-part of application No. 09/577,408, filed on May 18, 2000, now abandoned.
(60) Provisional application No. 60/306,971, filed on Jul. 21, 2001.

(51) Int. Cl. C12Q 1/68; C07H 21/04; C12N 9/00; C12P 21/02; C12N 5/06; C07K 14/47; C12N 15/85

(52) U.S. Cl. 435/6; 435/69.1; 435/183; 435/320.1; 435/325; 435/455; 530/350; 536/23.2

(57) ABSTRACT

The present invention provides novel nucleic acids, novel polypeptide sequences encoded by these nucleic acids and uses thereof.

### 1. CROSS REFERENCE TO RELATED APPLICATIONS

[0001] This application is a continuation-in-part application of U.S. application Ser. No. 09/488,725 filed Jan. 21, 2000 entitled “Novel Contigs Obtained from Various Libraries”, Attorney Docket No. 784; U.S. application Ser. No. 09/491,404 filed Jan. 25, 2000 entitled “Novel Contigs Obtained from Various Libraries”, Attorney Docket No. 785; U.S. application Ser. No. 09/496,914 filed Feb. 3, 2000 entitled “Novel Contigs Obtained from Various Libraries”, Attorney Docket No. 787; U.S. application Ser. No. 09/515,126 filed Feb. 28, 2000 entitled “Novel Contigs Obtained from Various Libraries”, Attorney Docket No. 798; U.S. application Ser. No. 09/519,705 filed Mar. 7, 2000 entitled “Novel Contigs Obtained from Various Libraries”, Attorney Docket No. 789; U.S. application Ser. No. 09/540,217 filed Mar. 31, 2000 entitled “Novel Contigs Obtained from Various Libraries”, Attorney Docket No. 790; U.S. application Ser. No. 09/552,929 filed Apr. 18, 2000 entitled “Novel Contigs Obtained from Various Libraries”, Attorney Docket No. 791; U.S. application Ser. No. 09/577,408 filed May 18, 2000 entitled “Novel Contigs Obtained from Various Libraries”, Attorney Docket No. 792; all of which are incorporated herein by reference in their entirety.

### 2. BACKGROUND OF THE INVENTION

[0002] 2.1 Technical Field

[0003] The present invention provides novel polynucleotides and proteins encoded by such polynucleotides, along with uses for these polynucleotides and proteins, for example in therapeutic, diagnostic and research methods.

[0004] 2.2 Background

[0005] Technology aimed at the discovery of protein factors (including e.g., cytokines, such as lymphokines, interferons, circulating soluble factors, chemokines, and interleukins) has matured rapidly over the past decade. The now routine hybridization cloning and expression cloning techniques clone novel polynucleotides “directly” in the sense that they rely on information directly related to the discovered protein (i.e., partial DNA/amino acid sequence of the protein in the case of hybridization cloning; activity of the protein in the case of expression cloning). More recent “indirect” cloning techniques such as signal sequence cloning, which isolates DNA sequences based on the presence of a now well-recognized secretory leader sequence motif, as well as various PCR-based or low stringency hybridization-based cloning techniques, have advanced the state of the art by making available large numbers of DNA/amino acid sequences for proteins that are known to have biological activity, for example, by virtue of their secreted nature in the case of leader sequence cloning, by virtue of their cell or tissue source in the case of PCR-based techniques, or by virtue of structural similarity to other genes of known biological activity.

[0006] Identified polynucleotide and polypeptide sequences have numerous applications in, for example, diagnostics, forensics, gene mapping; identification of mutations responsible for genetic disorders or other traits, to assess biodiversity, and to produce many other types of data and products dependent on DNA and amino acid sequences.

### 3. SUMMARY OF THE INVENTION

[0007] The compositions of the present invention include novel isolated polypeptides, novel isolated polynucleotides encoding such polypeptides, including recombinant DNA molecules, cloned genes or degenerate variants thereof, especially naturally occurring variants such as allelic variants, antisense polynucleotide molecules, and antibodies that specifically recognize one or more epitopes present on such polypeptides, as well as hybridomas producing such antibodies.

[0008] The compositions of the present invention additionally include vectors, including expression vectors, containing the polynucleotides of the invention, cells genetically engineered to contain such polynucleotides and cells genetically engineered to express such polynucleotides.

[0009] The present invention relates to a collection or library of at least one novel nucleic acid sequence assembled from expressed sequence tags (ESTs) isolated mainly by sequencing by hybridization (SBH), and in some cases, sequences obtained from one or more public databases. The invention relates also to the proteins encoded by such polynucleotides, along with therapeutic, diagnostic and research utilities for these polynucleotides and proteins. These nucleic acid sequences are designated as SEQ ID NO: 1-244, or 489-706 and are provided in the Sequence Listing. In the nucleic acids provided in the Sequence Listing, A is adenine; C is cytosine; G is guanine; T is thymine; and N is any of the four bases or unknown. In the amino acids provided in the Sequence Listing, * corresponds to the stop codon.

[0010] The nucleic acid sequences of the present invention also include, nucleic acid sequences that hybridize to the complement of SEQ ID NO: 1-244, or 489-706 under stringent hybridization conditions; nucleic acid sequences which are allelic variants or species homologues of any of the nucleic acid sequences recited above, or nucleic acid sequences that encode a peptide comprising a specific domain or truncation of the peptides encoded by SEQ ID NO: 1-244, or 489-706. A polynucleotide comprising a nucleotide sequence having at least 90% identity to an identifying sequence of SEQ ID NO: 1-244, or 489-706 or a degenerate variant or fragment thereof. The identitying sequence can be 100 base pairs in length.

[0011] The nucleic acid sequences of the present invention also include the sequence information from the nucleic acid sequences of SEQ ID NO: 1-244, or 489-706. The sequence information can be a segment of any one of SEQ ID NO: 1-244, or 489-706 that uniquely identifies or represents the sequence information of SEQ ID NO: 1-244, or 489-706.

[0012] A collection as used in this application can be a collection of only one polynucleotide. The collection of sequence information or identifying information of each sequence can be provided on a nucleic acid array. In one embodiment, segments of sequence information are provided on a nucleic acid array to detect the polynucleotide that contains the segment. The array can be designed to detect full-match or mismatch to the polynucleotide that contains the segment. The collection can also be provided in a computer-readable format.

[0013] This invention also includes the reverse or direct complement of any of the nucleic acid sequences recited above; cloning or expression vectors containing the nucleic acid sequences; and host cells or organisms transformed with these expression vectors. Nucleic acid sequences (or their reverse or direct complements) according to the invention have numerous applications in a variety of techniques known to those skilled in the art of molecular biology, such as use as hybridization probes, use as primers for PCR, use in an array, use in computer-readable media, use in sequencing full-length genes, use for chromosome and gene mapping, use in the recombinant production of protein, and use in the generation of anti-sense DNA or RNA, their chemical analogs and the like.

[0014] In a preferred embodiment, the nucleic acid sequences of SEQ ID NO: 1-244, or 489-706 or novel segments or parts of the nucleic acids of the invention are used as primers in expression assays that are well known in the art. In a particularly preferred embodiment, the nucleic acid sequences of SEQ ID NO: 1-244, or 489-706 or novel segments or parts of the nucleic acids provided herein are used in diagnostics for identifying expressed genes or, as well known in the art and exemplified by Voltrath et al., Science 258:52-59 (1992), as expressed sequence tags for physical mapping of the human genome.

[0015] The isolated polynucleotides of the invention include, but are not limited to, a polynucleotide comprising any one of the nucleotide sequences set forth in SEQ ID NO: 1-244, or 489-706; a polynucleotide comprising any of the full length protein coding sequences of SEQ ID NO: 1-244, or 489-706; and a polynucleotide comprising any of the nucleotide sequences of the mature protein coding sequences of SEQ ID NO: 1-244, or 489-706. The polynucleotides of the present invention also include, but are not limited to, a polynucleotide that hybridizes under stringent hybridization conditions to (a) the complement of any one of the nucleotide sequences set forth in SEQ ID NO: 1-244, or 489-706; (b) a nucleotide sequence encoding any one of the amino acid sequences set forth in SEQ ID NO: 1-244, or 489-706; (c) a polynucleotide which is an allelic variant of any polynucleotides recited above; (d) a polynucleotide which encodes a species homolog (e.g. orthologs) of any of the proteins recited above; or (e) a polynucleotide that encodes a polypeptide comprising a specific domain or truncation of any of the polypeptides comprising an amino acid sequence set forth in the Sequence Listing.

[0016] The isolated polypeptides of the invention include, but are not limited to, a polypeptide comprising any of the amino acid sequences set forth in the Sequence Listing; or the corresponding full length or mature protein. Polypeptides of the invention also include polypeptides with biological activity that are encoded by (a) any of the polynucleotides having a nucleotide sequence set forth in SEQ ID NO: 1-244, or 489-706; or (b) polynucleotides that hybridize to the complement of the polynucleotides of (a) under stringent hybridization conditions. Biologically active variants of any of the polypeptide sequences in the Sequence Listing, and “substantial equivalents” thereof (e.g., with at least about 65%, 70%, 75%, 80%, 85%, 90%, 95%, 98% or 99% amino acid sequence identity) that preferably retain biological activity are also contemplated. The polypeptides of the invention may be wholly or partially chemically synthesized but are preferably produced by recombinant means using the genetically engineered cells (e.g. host cells) of the invention The invention also provides compositions comprising a polypeptide of the invention. Polypeptide compositions of the invention may further comprise an acceptable carrier, such as a hydrophilic, e.g., pharmaceutically acceptable, carrier.

[0017] The invention also provides host cells transformed or transfected with a polynucleotide of the invention.

[0018] The invention also relates to methods for producing a polypeptide of the invention comprising growing a culture of the host cells of the invention in a suitable culture medium under conditions permitting expression of the desired polypeptide, and purifying the polypeptide from the culture or from the host cells. Preferred embodiments include those in which the protein produced by such processes is a mature form of the protein.

[0019] Polynucleotides according to the invention have numerous applications in a variety of techniques known to those skilled in the art of molecular biology. These techniques include use as hybridization probes, use as oligomers, or primers, for PCR, use for chromosome and gene mapping, use in the recombinant production of protein, and use in generation of anti-sense DNA or RNA, their chemical analogs and the like. For example, when the expression of an mRNA is largely restricted to a particular cell or tissue type, polynucleotides of the invention can be used as hybridization probes to detect the presence of the particular cell or tissue mRNA in a sample using, e.g., in situ hybridization.

[0020] In other exemplary embodiments, the polynucleotides are used in diagnostics as expressed sequence tags for identifying expressed genes or, as well known in the art and exemplified by Volirath et al., Science 258:52-59 (1992), as expressed sequence tags for physical mapping of the human genome.

[0021] The polypeptides according to the invention can be used in a variety of conventional procedures and methods that are currently applied to other proteins. For example, a polypeptide of the invention can be used to generate an antibody that specifically binds the polypeptide. Such antibodies, particularly monoclonal antibodies, are useful for detecting or quantitating the polypeptide in tissue. The polypeptides of the invention can also be used as molecular weight markers, and as a food supplement.

[0022] Methods are also provided for preventing, treating, or ameliorating a medical condition which comprises the step of administering to a mammalian subject a therapeutically effective amount of a composition comprising a polypeptide of the present invention and a pharmaceutically acceptable carrier.

[0023] In particular, the polypeptides and polynucleotides of the invention can be utilized, for example, in methods for the prevention and/or treatment of disorders involving aberrant protein expression or biological activity.

[0024] The present invention further relates to methods for detecting the presence of the polynucleotides or polypeptides of the invention in a sample. Such methods can, for example, be utilized as part of prognostic and diagnostic evaluation of disorders as recited herein and for the identification of subjects exhibiting a predisposition to such conditions. The invention provides a method for detecting the polynucleotides of the invention in a sample, comprising contacting the sample with a compound that binds to and forms a complex with the polynucleotide of interest for a period sufficient to form the complex and under conditions sufficient to form a complex and detecting the complex such that if a complex is detected, the polynucleotide of interest is detected. The invention also provides a method for detecting the polypeptides of the invention in a sample comprising contacting the sample with a compound that binds to and forms a complex with the polypeptide under conditions and for a period sufficient to form the complex and detecting the formation of the complex such that if a complex is formed, the polypeptide is detected.

[0025] The invention also provides kits comprising polynucleotide probes and/or monoclonal antibodies, and optionally quantitative standards, for carrying out methods of the invention. Furthermore, the invention provides methods for evaluating the efficacy of drugs, and monitoring the progress of patients, involved in clinical trials for the treatment of disorders as recited above.

[0026] The invention also provides methods for the identification of compounds that modulate (i.e., increase or decrease) the expression or activity of the polynucleotides and/or polypeptides of the invention. Such methods can be utilized, for example, for the identification of compounds that can ameliorate symptoms of disorders as recited herein.

[0027] Such methods can include, but are not limited to, assays for identifying compounds and other substances that interact with (e.g., bind to) the polypeptides of the invention. The invention provides a method for identifying a compound that binds to the polypeptides of the invention comprising contacting the compound with a polypeptide of the invention in a cell for a time sufficient to form a polypeptide/compound complex, wherein the complex drives expression of a reporter gene sequence in the cell; and detecting the complex by detecting the reporter gene sequence expression such that if expression of the reporter gene is detected the compound that binds to a polypeptide of the invention is identified.

[0028] The methods of the invention also provide methods for treatment which involve the administration of the polynucleotides or polypeptides of the invention to individuals exhibiting symptoms or tendencies. In addition, the invention encompasses methods for treating diseases or disorders as recited herein comprising administering compounds and other substances that modulate the overall activity of the target gene products.

[0029] Compounds and other substances can affect such modulation either on the level of target gene/protein expression or target protein activity.

[0030] The polypeptides of the present invention and the polynucleotides encoding them are also useful for the same functions known to one of skill in the art as the polypeptides and polynucleotides to which they have homology (set forth in Table 2); for which they have a signature region (as set forth in Table 3); or for which they have homology to a gene family (as set forth in Table 4). If no homology is set forth for a sequence, then the polypeptides and polynucleotides of the present invention are useful for a variety of applications, as described herein, including use in arrays for detection.

### 4. DETAILED DESCRIPTION OF THE INVENTION

[0031] 4.1 Definitions

[0032] It must be noted that as used herein and in the appended claims, the singular forms “a”, “an” and “the” include plural references unless the context clearly dictates otherwise.

[0033] The term “active” refers to those forms of the polypeptide which retain the biologic and/or immunologic activities of any naturally occurring polypeptide. According to the invention, the terms “biologically active” or “biological activity” refer to a protein or peptide having structural, regulatory or biochemical functions of a naturally occurring molecule. Likewise “immunologically active” or “immunological activity” refers to the capability of the natural, recombinant or synthetic polypeptide to induce a specific immune response in appropriate animals or cells and to bind with specific antibodies.

[0034] The term “activated cells” as used in this application are those cells which are engaged in extracellular or intracellular membrane trafficking, including the export of secretory or enzymatic molecules as part of a normal or disease process.

[0035] The terms “complementary” or “complementarity” refer to the natural binding of polynucleotides by base pairing. For example, the sequence 5′-AGT-3′ binds to the complementary sequence 3′-TCA-5′. Complementarity between two single-stranded molecules may be “partial” such that only certain portion(s) of the nucleic acids bind or it may be “complete” such that total complementarity exists between the single stranded molecules. The degree of complementarity between the nucleic acid strands has significant effects on the efficiency and strength of the hybridization between the nucleic acid strands.

[0036] The term “embryonic stem cells (ES)” refers to a cell that can give rise to many differentiated cell types in an embryo or an adult, including the germ cells. The term “germ line stem cells (GS Cs)” refers to stem cells derived from primordial stem cells that provide a steady and continuous source of germ cells for the production of gametes. The term “primordial germ cells (PGCs)” refers to a small population of cells set aside from other cell lineages particularly from the yolk sac, mesenteries, or gonadal ridges during embryogenesis that have the potential to differentiate into germ cells and other cells. PGCs are the source from which GSCs and ES cells are derived. The PGCs, the GSCs and the ES cells are capable of self-renewal. Thus these cells not only populate the germ line and give rise to a plurality of terminally differentiated cells that comprise the adult specialized organs, but are able to regenerate themselves.

[0037] The term “expression modulating fragment,” EMF, means a series of nucleotides which modulates the expression of an operably linked ORF or another EMF.

[0038] As used herein, a sequence is said to “modulate the expression of an operably linked sequence” when the expression of the sequence is altered by the presence of the EMF. EMFs include, but are not limited to, promoters, and promoter modulating sequences (inducible elements). One class of EMFs are nucleic acid fragments which induce the expression of an operably linked ORF in response to a specific regulatory factor or physiological event.

[0039] The terms “nucleotide sequence” or “nucleic acid” or “polynucleotide” or “oligonucleotide” are used interchangeably and refer to a heteropolymer of nucleotides or the sequence of these nucleotides. These phrases also refer to DNA or RNA of genomic or synthetic origin which may be single-stranded or double-stranded and may represent the sense or the antisense strand, to peptide nucleic acid (PNA) or to any DNA-like or RNA-like material. In the sequences herein A is adenine, C is cytosine, T is thymine, G is guanine and N is A, C, G, or T (U) or unknown. It is contemplated that where the polynucleotide is RNA, the T (thymine) in the sequences provided herein is substituted with U (uracil). Generally, nucleic acid segments provided by this invention may be assembled from fragments of the genome and short oligonucleotide linkers, or from a series of oligonucleotides, or from individual nucleotides, to provide a synthetic nucleic acid which is capable of being expressed in a recombinant transcriptional unit comprising regulatory elements derived from a microbial or viral operon, or a eukaryotic gene.

[0040] The terms “oligonucleotide fragment” or a “polynucleotide fragment”, “portion,” or “segment” or “probe” or “primer” are used interchangeably and refer to a sequence of nucleotide residues which are at least about 5 nucleotides, more preferably at least about 7 nucleotides, more preferably at least about 9 nucleotides, more preferably at least about 11 nucleotides and most preferably at least about 17 nucleotides. The fragment is preferably less than about 500 nucleotides, preferably less than about 200 nucleotides, more preferably less than about 100 nucleotides, more preferably less than about 50 nucleotides and most preferably less than 30 nucleotides. Preferably the probe is from about 6 nucleotides to about 200 nucleotides, preferably from about 15 to about 50 nucleotides, more preferably from about 17 to 30 nucleotides and most preferably from about 20 to 25 nucleotides. Preferably the fragments can be used in polymerase chain reaction (PCR), various hybridization procedures or microarray procedures to identify or amplify identical or related parts of mRNA or DNA molecules. A fragment or segment may uniquely identify each polynucleotide sequence of the present invention. Preferably the fragment comprises a sequence substantially similar-to any one of SEQ ID NO: 1-244, or 489-706.

[0041] Probes may, for example, be used to determine whether specific mRNA molecules are present in a cell or tissue or to isolate similar nucleic acid sequences from chromosomal DNA as described by Walsh et al. (Walsh, P. S. et al., 1992, PCR Methods Appl 1:241-250). They may be labeled by nick translation, Klenow fill-in reaction, PCR, or other methods well known in the art. Probes of the present invention, their preparation and/or labeling are elaborated in Sambrook, J. et al., 1989, Molecular Cloning: A Laboratory Manual, Cold Spring Harbor Laboratory, NY; or Ausubel, F. M. et al., 1989, Current Protocols in Molecular Biology, John Wiley & Sons, New York N.Y., both of which are incorporated herein by reference in their entirety.

[0042] The nucleic acid sequences of the present invention also include the sequence information from the nucleic acid sequences of SEQ ID NO: 1-244, or 489-706. The sequence information can be a segment of any one of SEQ ID NO: 1-244, or 489-706 that uniquely identifies or represents the sequence information of that sequence of SEQ ID NO: 1-244, or 489-706, or those segments identified in Tables 3, 5, 6, and 8. One such segment can be a twenty-mer nucleic acid sequence because the probability that a twenty-mer is fully matched in the human genome is 1 in 300. In the human genome, there are three billion base pairs in one set of chromosomes. Because 420 possible twenty-mers exist, there are 300 times more twenty-mers than there are base pairs in a set of human chromosomes. Using the same analysis, the probability for a seventeen-mer to be fully matched in the human genome is approximately 1 in 5. When these segments are used in arrays for expression studies, fifteen-mer segments can be used. The probability that the fifteen-mer is fully matched in the expressed sequences is also approximately one in five because expressed sequences comprise less than approximately 5% of the entire genome sequence.

[0043] Similarly, when using sequence information for detecting a single mismatch, a segment can be a twenty-five mer. The probability that the twenty-five mer would appear in a human genome with a single mismatch is calculated by multiplying the probability for a full match (1425) times the increased probability for mismatch at each nucleotide position (3×25). The probability that an eighteen mer with a single mismatch can be detected in an array for expression studies is approximately one in five. The probability that a twenty-mer with a single mismatch can be detected in a human genome is approximately one in five.

[0044] The term “open reading frame, ”ORF, means a series of nucleotide triplets coding for amino acids without any termination codons and is a sequence translatable into protein.

[0045] The terms “operably linked” or “operably associated” refer to functionally related nucleic acid sequences. For example, a promoter is operably associated or operably linked with a coding sequence if the promoter controls the transcription of the coding sequence. While operably linked nucleic acid sequences can be contiguous and in the same reading frame, certain genetic elements e.g. repressor genes are not contiguously linked to the coding sequence but still control transcription/translation of the coding sequence.

[0046] The term “pluripotent” refers to the capability of a cell to differentiate into a number of differentiated cell types that are present in an adult organism. A pluripotent cell is restricted in its differentiation capability in comparison to a totipotent cell.

[0047] The terms “polypeptide” or “peptide” or “amino acid sequence” refer to an oligopeptide, peptide, polypeptide or protein sequence or fragment thereof and to naturally occurring or synthetic molecules. A polypeptide “fragment,” “portion,” or “segment” is a stretch of amino acid residues of at least about 5 amino acids, preferably at least about 7 amino acids, more preferably at least about 9 amino acids and most preferably at least about 17 or more amino acids. The peptide preferably is not greater than about 200 amino acids, more preferably less than 150 amino acids and most preferably less than 100 amino acids. Preferably the peptide is from about 5 to about 200 amino acids. To be active, any polypeptide must have sufficient length to display biological and/or immunological activity.

[0048] The term “naturally occurring polypeptide” refers to polypeptides produced by cells that have not been genetically engineered and specifically contemplates various polypeptides arising from post-translational modifications of the polypeptide including, but not limited to, acetylation, carboxylation, glycosylation, phosphorylation, lipidation and acylation.

[0049] The term “translated protein coding portion” means a sequence which encodes for the full-length protein which may include any leader sequence or any processing sequence.

[0050] The term “mature protein coding sequence” means a sequence which encodes a peptide or protein without a signal or leader sequence. The “mature protein portion” means that portion of the protein which does not include a signal or leader sequence. The peptide may have been produced by processing in the cell which removes any leader/signal sequence. The mature protein portion may or may not include the initial methionine residue. The methionine residue may be removed from the protein during processing in the cell. The peptide may be produced synthetically or the protein may have been produced using a polynucleotide only encoding for the mature protein coding sequence.

[0051] The term “derivative” refers to polypeptides chemically modified by such techniques as ubiquitination, labeling (e.g., with radionuclides or various enzymes), covalent polymer attachment such as pegylation (derivatization with polyethylene glycol) and insertion or substitution by chemical synthesis of amino acids such as ornithine, which do not normally occur in human proteins.

[0052] The term “variant” (or “analog”) refers to any polypeptide differing from naturally occurring polypeptides by amino acid insertions, deletions, and substitutions, created using, e g., recombinant DNA techniques. Guidance in determining which amino acid residues may be replaced, added or deleted without abolishing activities of interest, may be found by comparing the sequence of the particular polypeptide with that of homologous peptides and minimizing the number of amino acid sequence changes made in regions of high homology (conserved regions) or by replacing amino acids with consensus sequence.

[0053] Alternatively, recombinant variants encoding these same or similar polypeptides may be synthesized or selected by making use of the “redundancy” in the genetic code. Various codon substitutions, such as the silent changes which produce various restriction sites, may be introduced to optimize cloning into a plasmid or viral vector or expression in a particular prokaryotic or eukaryotic system. Mutations in the polynucleotide sequence may be reflected in the polypeptide or domains of other peptides added to the polypeptide to modify the properties of any part of the polypeptide, to change characteristics such as ligand-binding affinities, interchain affinities, or degradation/turnover rate.

[0054] Preferably, amino acid “substitutions” are the result of replacing one amino acid with another amino acid having similar structural and/or chemical properties, i.e., conservative amino acid replacements. “Conservative” amino acid substitutions may be made on the basis of similarity in polarity, charge, solubility, hydrophobicity, hydrophilicity, and/or the amphipathic nature of the residues involved. For example, nonpolar (hydrophobic) amino acids include alanine, leucine, isoleucine, valine, proline, phenylalanine, tryptophan, and methionine; polar neutral amino acids include glycine, serine, threonine, cysteine, tyrosine, asparagine, and glutamine; positively charged (basic) amino acids include arginine, lysine, and histidine; and negatively charged (acidic) amino acids include aspartic acid and glutamic acid. “Insertions” or “deletions” are preferably in the range of about 1 to 20 amino acids, more preferably 1 to 10 amino acids. The variation allowed may be experimentally determined by systematically making insertions, deletions, or substitutions of amino acids in a polypeptide molecule using recombinant DNA techniques and assaying the resulting recombinant variants for activity.

[0055] Alternatively, where alteration of function is desired, insertions, deletions or non-conservative alterations can be engineered to produce altered polypeptides. Such alterations can, for example, alter one or more of the biological functions or biochemical characteristics of the polypeptides of the invention. For example, such alterations may change polypeptide characteristics such as ligand-binding affinities, interchain affinities, or degradation/turnover rate. Further, such alterations can be selected so as to generate polypeptides that are better suited for expression, scale up and the like in the host cells chosen for expression. For example, cysteine residues can be deleted or substituted with another amino acid residue in order to eliminate disulfide bridges.

[0056] The terms “purified” or “substantially purified” as used herein denotes that the indicated nucleic acid or polypeptide is present in the substantial absence of other biological macromolecules, e.g., polynucleotides, proteins, and the like. In one embodiment, the polynucleotide or polypeptide is purified such that it constitutes at least 95% by weight, more preferably at least 99% by weight, of the indicated biological macromolecules present (but water, buffers, and other small molecules, especially molecules having a molecular weight of less than 1000 daltons, can be present).

[0057] The term “isolated” as used herein refers to a nucleic acid or polypeptide separated from at least one other component (e.g., nucleic acid or polypeptide) present with the nucleic acid or polypeptide in its natural source. In one embodiment, the nucleic acid or polypeptide is found in the presence of (if anything) only a solvent, buffer, ion, or other component normally present in a solution of the same. The terms “isolated” and “purified” do not encompass nucleic acids or polypeptides present in their natural source.

[0058] The term “recombinant,” when used herein to refer to a polypeptide or protein, means that a polypeptide or protein is derived from recombinant (e.g., microbial, insect, or mammalian) expression systems. “Microbial” refers to recombinant polypeptides or proteins made in bacterial or fungal (e.g., yeast) expression systems. As a product, “recombinant microbial” defines a polypeptide or protein essentially free of native endogenous substances and unaccompanied by associated native glycosylation.

[0059] Polypeptides or proteins expressed in most bacterial cultures, e.g., E. coli, will be free of glycosylation modifications; polypeptides or proteins expressed in yeast will have a glycosylation pattern in general different from those expressed in mammalian cells.

[0060] The term “recombinant expression vehicle or vector” refers to a plasmid or phage or virus or vector, for expressing a polypeptide from a DNA (RNA) sequence. An expression vehicle can comprise a transcriptional unit comprising an assembly of (1) a genetic element or elements having a regulatory role in gene expression, for example, promoters or enhancers, (2) a structural or coding sequence which is transcribed into mRNA and translated into protein, and (3) appropriate transcription initiation and termination sequences. Structural units intended for use in yeast or eukaryotic expression systems preferably include a leader sequence enabling extracellular secretion of translated protein by a host cell. Alternatively, where recombinant protein is expressed without a leader or transport sequence, it may include an amino terminal methionine residue. This residue may or may not be subsequently cleaved from the expressed recombinant protein to provide a final product.

[0061] The term “recombinant expression system” means host cells which have stably integrated a recombinant transcriptional unit into chromosomal DNA or carry the recombinant transcriptional unit extrachromosomally. Recombinant expression systems as defined herein will express heterologous polypeptides or proteins upon induction of the regulatory elements linked to the DNA segment or synthetic gene to be expressed. This term also means host cells which have stably integrated a recombinant genetic element or elements having a regulatory role in gene expression, for example, promoters or enhancers. Recombinant expression systems as defined herein will express polypeptides or proteins endogenous to the cell upon induction of the regulatory elements linked to the endogenous DNA segment or gene to be expressed. The cells can be prokaryotic or eukaryotic.

[0062] The term “secreted” includes a protein that is transported across or through a membrane, including transport as a result of signal sequences in its amino acid sequence when it is expressed in a suitable host cell. “Secreted” proteins include without limitation proteins secreted wholly (e.g., soluble proteins) or partially (e.g., receptors) from the cell in which they are expressed. “Secreted” proteins also include without limitation proteins that are transported across the membrane of the endoplasmic reticulum. “Secreted” proteins are also intended to include proteins containing non-typical signal sequences (e.g. Interleukin-1 Beta, see Krasney, P. A. and Young, P. R. (1992) Cytokine 4(2): 134-143) and factors released from damaged cells (e.g. Interleukin-1 Receptor Antagonist, see Arend, W. P. et. al. (1998) Annu. Rev. Immunol. 16:27-55)

[0063] Where desired, an expression vector may be designed to contain a “signal or leader sequence” which will direct the polypeptide through the membrane of a cell. Such a sequence may be naturally present on the polypeptides of the present invention or provided from heterologous protein sources by recombinant DNA techniques.

[0064] The term “stringent” is used to refer to conditions that are commonly understood in the art as stringent. Stringent conditions can include highly stringent conditions (i.e., hybridization to filter-bound DNA in 0.5 M NaHPO₄, 7% sodium dodecyl sulfate (SDS), 1 mM EDTA at 65° C., and washing in 0.1×SSC/0.1% SDS at 68° C.), and moderately stringent conditions (i.e., washing in 0.2×SSC/0.1% SDS at 42° C.). Other exemplary hybridization conditions are described herein in the examples.

[0065] In instances of hybridization of deoxyoligonucleotides, additional exemplary stringent hybridization conditions include washing in 6×SSC/0.05% sodium pyrophosphate at 37° C. (for 14-base oligonucleotides), 48° C. (for 17-base oligonucleotides), 55° C. (for 20-base oligonucleotides), and 60° C. (for 23-base oligonucleotides).

[0066] As used herein, “substantially equivalent” or “substantially similar” can refer both to nucleotide and amino acid sequences, for example a mutant sequence, that varies from a reference sequence by one or more substitutions, deletions, or additions, the net effect of which does not result in an adverse functional dissimilarity between the reference and subject sequences. Typically, such a substantially equivalent sequence varies from one of those listed herein by no more than about 35% (i.e., the number of individual residue substitutions, additions, and/or deletions in a substantially equivalent sequence, as compared to the corresponding reference sequence, divided by the total number of residues in the substantially equivalent sequence is about 0.35 or less). Such a sequence is said to have 65% sequence identity to the listed sequence. In one embodiment, a substantially equivalent, e.g., mutant, sequence of the invention varies from a listed sequence by no more than 30% (70% sequence identity); in a variation of this embodiment, by no more than 25% (75% sequence identity); and in a further variation of this embodiment, by no more than 20% (80% sequence identity) and in a further variation of this embodiment, by no more than 10% (90% sequence identity) and in a further variation of this embodiment, by no more that 5% (95% sequence identity). Substantially equivalent, e.g., mutant, amino acid sequences according to the invention preferably have at least 80% sequence identity with a listed amino acid sequence, more preferably at least 85% sequence identity, more preferably at least 90% sequence identity, more preferably at least 95% sequence identity, more preferably at least 98% sequence identity, and most preferably at least 99% sequence identity. Substantially equivalent nucleotide sequence of the invention can have lower percent sequence identities, taking into account, for example, the redundancy or degeneracy of the genetic code. Preferably, the nucleotide sequence has at least about 65% identity, more preferably at least about 75% identity, more preferably at least about 80% sequence identity, more preferably at least 85% sequence identity, more preferably at least 90% sequence identity, more preferably at least about 95% sequence identity, more preferably at least 98% sequence identity, and most preferably at least 99% sequence identity. For the purposes of the present invention, sequences having substantially equivalent biological activity and substantially equivalent expression characteristics are considered substantially equivalent. For the purposes of determining equivalence, truncation of the mature sequence (e.g., via a mutation which creates a new stop codon) should be disregarded. Sequence identity may be determined, e.g., using the Jotun Hein method (Hein, J. (1990) Methods Enzymol. 183:626-645). Identity between sequences can also be determined by other methods 15 known in the art, e.g. by varying hybridization conditions.

[0067] The term “totipotent” refers to the capability of a cell to differentiate into all of the cell types of an adult organism.

[0068] The term “transformation” means introducing DNA into a suitable host cell so that the DNA is replicable, either as an extrachromosomal element, or by chromosomal integration. The term “transfection” refers to the taking up of an expression vector by a suitable host cell, whether or not any coding sequences are in fact expressed. The term “infection” refers to the introduction of nucleic acids into a suitable host cell by use of a virus or viral vector.

[0069] As used herein, an “uptake modulating fragment,” UMF, means a series of nucleotides which mediate the uptake of a linked DNA fragment into a cell. UMFs can be readily identified using known UMFs as a target sequence or target motif with the computer-based systems described below. The presence and activity of a UMF can be confirmed by attaching the suspected UMF to a marker sequence. The resulting nucleic acid molecule is then incubated with an appropriate host under appropriate conditions and the uptake of the marker sequence is determined. As described above, a UMF will increase the frequency of uptake of a linked marker sequence.

[0070] Each of the above terms is meant to encompass all that is described for each, unless the context dictates otherwise.

[0071] 4.2 Nucleic Acids of the Invention

[0072] Nucleotide sequences of the invention are set forth in the Sequence Listing.

[0073] The isolated polynucleotides of the invention include a polynucleotide comprising the nucleotide sequences of SEQ ID NO: 1-244, or 489-706; a polynucleotide encoding any one of the peptide sequences of SEQ ID NO: 1-244, or 489-706; and a polynucleotide comprising the nucleotide sequence encoding the mature protein coding sequence of the polynucleotides of any one of SEQ ID NO: 1-244, or 489-706. The polynucleotides of the present invention also include, but are not limited to, a polynucleotide that hybridizes under stringent conditions to (a) the complement of any of the nucleotides sequences of SEQ ID NO: 1-244, or 489-706; (b) nucleotide sequences encoding any one of the amino acid sequences set forth in the Sequence Listing, or Table 8; (c) a polynucleotide which is an allelic variant of any polynucleotide recited above; (d) a polynucleotide which encodes a species homolog of any of the proteins recited above; or (e) a polynucleotide that encodes a polypeptide comprising a specific domain or truncation of the polypeptides of SEQ ID NO: 1-244, or 489-706 (for example, as set forth in Tables 3, 5, 6, or 8). Domains of interest may depend on the nature of the encoded polypeptide; e.g., domains in receptor-like polypeptides include ligand-binding, extracellular, transmembrane, or cytoplasmic domains, or combinations thereof, domains in immunoglobulin-like proteins include the variable immunoglobulin-like domains; domains in enzyme-like polypeptides include catalytic and substrate binding domains; and domains in ligand polypeptides include receptor-binding domains.

[0074] The polynucleotides of the invention include naturally occurring or wholly or partially synthetic DNA, e.g., cDNA and genomic DNA, and RNA, e.g., mRNA. The polynucleotides may include entire coding region of the cDNA or may represent a portion of the coding region of the cDNA.

[0075] The present invention also provides genes corresponding to the cDNA sequences disclosed herein. The corresponding genes can be isolated in accordance with known methods using the sequence information disclosed herein. Such methods include the preparation of probes or primers from the disclosed sequence information for identification and/or amplification of genes in appropriate genomic libraries or other sources of genomic materials. Further 5′ and 3′ sequence can be obtained using methods known in the art. For example, full length cDNA or genomic DNA that corresponds to any of the polynucleotides of SEQ ID NO: 1-244, or 489-706 can be obtained by screening appropriate cDNA or genomic DNA libraries under suitable hybridization conditions using any of the polynucleotides of SEQ ID NO: 1-244, or 489-706 or a portion thereof as a probe.

[0076] Alternatively, the polynucleotides of SEQ ID NO: 1-244, or 489-706 may be used as the basis for suitable primer(s) that allow identification and/or amplification of genes in appropriate genomic DNA or cDNA libraries.

[0077] The nucleic acid sequences of the invention can be assembled from ESTs and sequences (including cDNA and genomic sequences) obtained from one or more public databases, such as dbEST, gbpi, and UniGene. The EST sequences can provide identifying sequence information, representative fragment or segment information, or novel segment information for the full-length gene.

[0078] The polynucleotides of the invention also provide polynucleotides including nucleotide sequences that are substantially equivalent to the polynucleotides recited above. Polynucleotides according to the invention can have, e.g., at least about 65%, at least about 70%, at least about 75%, at least about 80%, 81%, 82%, 83%, 84%, more typically at least about 85%, 86%, 87%, 88%, 89%, more typically at least about 90%, 91%, 92%, 93%, 94%, and even more typically at least about 95%, 96%, 97%, 98%, 99% sequence identity to a polynucleotide recited above.

[0079] Included within the scope of the nucleic acid sequences of the invention are nucleic acid sequence fragments that hybridize under stringent conditions to any of the nucleotide sequences of SEQ ID NO: 1-244, or 489-706, or complements thereof, which fragment is greater than about 5 nucleotides, preferably 7 nucleotides, more preferably greater than 9 nucleotides and most preferably greater than 17 nucleotides. Fragments of, e.g. 15, 17, or 20 nucleotides or more that are selective for (i.e. specifically hybridize to) any one of the polynucleotides of the invention are contemplated. Probes capable of specifically hybridizing to a polynucleotide can differentiate polynucleotide sequences of the invention from other polynucleotide sequences in the same family of genes or can differentiate human genes from genes of other species, and are preferably based on unique nucleotide sequences.

[0080] The sequences falling within the scope of the present invention are not limited to these specific sequences, but also include allelic and species variations thereof Allelic and species variations can be routinely determined by comparing the sequence provided in SEQ ID NO: 1-244, or 489-706, a representative fragment thereof, or a nucleotide sequence at least 90% identical, preferably 95% identical, to SEQ ID NO: 1-244, or 489-706 with a sequence from another isolate of the same species. Furthermore, to accommodate codon variability, the invention includes nucleic acid molecules coding for the same amino acid sequences as do the specific ORFs disclosed herein. In other words, in the coding region of an ORF, substitution of one codon for another codon that encodes the same amino acid is expressly contemplated.

[0081] The nearest neighbor or homology results for the nucleic acids of the present invention, including SEQ ID NO: 1-244, or 489-706 can be obtained by searching a database using an algorithm or a program. Preferably, a BLAST (Basic Local Alignment Search Tool) program is used to search for local sequence alignments (Altshul, S. F. J. Mol. Evol. 36 290-300 (1993) and Altschul S. F. et al. J. Mol. Biol. 21:403-410 (1990)). Alternatively a FASTA version 3 search against Genpept, using FASTXY algorithm may be performed.

[0082] Species homologs (or orthologs) of the disclosed polynucleotides and proteins are also provided by the present invention. Species homologs may be isolated and identified by making suitable probes or primers from the sequences provided herein and screening a suitable nucleic acid source from the desired species.

[0083] The invention also encompasses allelic variants of the disclosed polynucleotides or proteins; that is, naturally-occurring alternative forms of the isolated polynucleotide which also encode proteins which are identical, homologous or related to that encoded by the polynucleotides.

[0084] The nucleic acid sequences of the invention are further directed to sequences which encode variants of the described nucleic acids. These amino acid sequence variants may be prepared by methods known in the art by introducing appropriate nucleotide changes into a native or variant polynucleotide. There are two variables in the construction of amino acid sequence variants: the location of the mutation and the nature of the mutation. Nucleic acids encoding the amino acid sequence variants are preferably constructed by mutating the polynucleotide to encode an amino acid sequence that does not occur in nature. These nucleic acid alterations can be made at sites that differ in the nucleic acids from different species (variable positions) or in highly conserved regions (constant regions). Sites at such locations will typically be modified in series, e.g., by substituting first with conservative choices (e.g., hydrophobic amino acid to a different hydrophobic amino acid) and then with more distant choices (e.g., hydrophobic amino acid to a charged amino acid), and then deletions or insertions may be made at the target site. Amino acid sequence deletions generally range from about 1 to 30 residues, preferably about 1 to 10 residues, and are typically contiguous. Amino acid insertions include amino- and/or carboxyl-terminal fusions ranging in length from one to one hundred or more residues, as well as intrasequence insertions of single or multiple amino acid residues. Intrasequence insertions may range generally from about 1 to 10 amino residues, preferably from 1 to 5 residues. Examples of terminal insertions include the heterologous signal sequences necessary for secretion or for intracellular targeting in different host cells and sequences such as FLAG or poly-histidine sequences useful for purifying the expressed protein.

[0085] In a preferred method, polynucleotides encoding the novel amino acid sequences are changed via site-directed mutagenesis. This method uses oligonucleotide sequences to alter a polynucleotide to encode the desired amino acid variant, as well as sufficient adjacent nucleotides on both sides of the changed amino acid to form a stable duplex on either side of the site of being changed. In general, the techniques of site-directed mutagenesis are well known to those of skill in the art and this technique is exemplified by publications such as, Edelman et al., DNA 2:183 (1983). A versatile and efficient method for producing site-specific changes in a polynucleotide sequence was published by Zoller and Smith, Nucleic Acids Res. 10:6487-6500 (1982). PCR may also be used to create amino acid sequence variants of the novel nucleic acids. When small amounts of template DNA are used as starting material, primer(s) that differs slightly in sequence from the corresponding region in the template DNA can generate the desired amino acid variant. PCR amplification results in a population of product DNA fragments that differ from the polynucleotide template encoding the polypeptide at the position specified by the primer. The product DNA fragments replace the corresponding region in the plasmid and this gives a polynucleotide encoding the desired amino acid variant.

[0086] A further technique for generating amino acid variants is the cassette mutagenesis technique described in Wells et al., Gene 34:315 (1985); and other mutagenesis techniques well known in the art, such as, for example, the techniques in Sambrook et al., supra, and Current Protocols in Molecular Biology, Ausubel et al. Due to the inherent degeneracy of the genetic code, other DNA sequences which encode substantially the same or a functionally equivalent amino acid sequence may be used in the practice of the invention for the cloning and expression of these novel nucleic acids. Such DNA sequences include those which are capable of hybridizing to the appropriate novel nucleic acid sequence under stringent conditions.

[0087] Polynucleotides encoding preferred polypeptide truncations of the invention could be used to generate polynucleotides encoding chimeric or fusion proteins comprising one or more domains of the invention and heterologous protein sequences.

[0088] The polynucleotides of the invention additionally include the complement of any of the polynucleotides recited above. The polynucleotide can be DNA (genomic, cDNA, amplified, or synthetic) or RNA. Methods and algorithms for obtaining such polynucleotides are well known to those of skill in the art and can include, for example, methods for determining hybridization conditions that can routinely isolate polynucleotides of the desired sequence identities.

[0089] In accordance with the invention, polynucleotide sequences comprising the mature protein coding sequences corresponding to any one of SEQ ID NO: 1-244, or 489-706, or functional equivalents thereof, may be used to generate recombinant DNA molecules that direct the expression of that nucleic acid, or a functional equivalent thereof, in appropriate host cells. Also included are the cDNA inserts of any of the clones identified herein.

[0090] A polynucleotide according to the invention can be joined to any of a variety of other nucleotide sequences by well-established recombinant DNA techniques (see Sambrook J et al. (1989) Molecular Cloning: A Laboratory Manual, Cold Spring Harbor Laboratory, NY). Useful nucleotide sequences for joining to polynucleotides include an assortment of vectors, e.g., plasmids, cosmids, lambda phage derivatives, phagemids, and the like, that are well known in the art. Accordingly, the invention also provides a vector including a polynucleotide of the invention and a host cell containing the polynucleotide. In general, the vector contains an origin of replication functional in at least one organism, convenient restriction endonuclease sites, and a selectable marker for the host cell. Vectors according to the invention include expression vectors, replication vectors, probe generation vectors, and sequencing vectors. A host cell according to the invention can be a prokaryotic or eukaryotic cell and can be a unicellular organism or part of a multicellular organism.

[0091] The present invention further provides recombinant constructs comprising a nucleic acid having any of the nucleotide sequences of SEQ ID NO: 1-244, or 489-706 or a fragment thereof or any other polynucleotides of the invention. In one embodiment, the recombinant constructs of the present invention comprise a vector, such as a plasmid or viral vector, into which a nucleic acid having any of the nucleotide sequences of SEQ ID NO: 1-244, or 489-706 or a fragment thereof is inserted, in a forward or reverse orientation. In the case of a vector comprising one of the ORFs of the present invention, the vector may further comprise regulatory sequences, including for example, a promoter, operably linked to the ORF. Large numbers of suitable vectors and promoters are known to those of skill in the art and are commercially available for generating the recombinant constructs of the present invention. The following vectors are provided by way of example: Bacterial: pBs, phagescript, PsiX174, pBluescript SK, pBs KS, pNH8a, pNH16a, pNH18a, pNH46a (Stratagene), pTrc99A, pKK223-3, pKK233-3, pDR540, pRIT5 (Pharmacia); Eukaryotic: pWLneo, pSV2cat, pOG44, PXTI, pSG (Stratagene) pSVK3, pBPV, pMSG, pSVL (Pharmacia).

[0092] The isolated polynucleotide of the invention may be operably linked to an expression control sequence such as the pMT2 or pED expression vectors disclosed in Kaufman et al., Nucleic Acids Res. 19, 4485-4490 (1991), in order to produce the protein recombinantly. Many suitable expression control sequences are known in the art. General methods of expressing recombinant proteins are also known and are exemplified in R. Kaufman, Methods in Enzymology 185, 537-566 (1990). As defined herein “operably linked” means that the isolated polynucleotide of the invention and an expression control sequence are situated within a vector or cell in such a way that the protein is expressed by a host cell which has been transformed (transfected) with the ligated polynucleotide/expression control sequence.

[0093] Promoter regions can be selected from any desired gene using CAT (chloramphenicol transferase) vectors or other vectors with selectable markers. Two appropriate vectors are pKK232-8 and pCM7. Particular named bacterial promoters include lac, lacZ, T3, T7, gpt, lambda PR, and trc. Eukaryotic promoters include CMV immediate early, HSV thymidine kinase, early and late SV40, LTRs from retrovirus, and mouse metallothionein-I. Selection of the appropriate vector and promoter is well within the level of ordinary skill in the art. Generally, recombinant expression vectors will include origins of replication and selectable markers permitting transformation of the host cell, e.g., the ampicillin resistance gene of E. coli and S. cerevisiae TRP1 gene, and a promoter derived from a highly expressed gene to direct transcription of a downstream structural sequence. Such promoters can be derived from operons encoding glycolytic enzymes such as 3-phosphoglycerate kinase (PGK), a-factor, acid phosphatase, or heat shock proteins, among others. The heterologous structural sequence is assembled in appropriate phase with translation initiation and termination sequences, and preferably, a leader sequence capable of directing secretion of translated protein into the periplasmic space or extracellular medium. Optionally, the heterologous sequence can encode a fusion protein including an amino terminal identification peptide imparting desired characteristics, e.g., stabilization or simplified purification of expressed recombinant product. Useful expression vectors for bacterial use are constructed by inserting a structural DNA sequence encoding a desired protein together with suitable translation initiation and termination signals in operable reading phase with a functional promoter. The vector will comprise one or more phenotypic selectable markers and an origin of replication to ensure maintenance of the vector and to, if desirable, provide amplification within the host. Suitable prokaryotic hosts for transformation include E. coli, Bacillus subtilis, Salmonella typhimurium and various species within the genera Pseudomonas, Streptomyces, and Staphylococcus, although others may also be employed as a matter of choice.

[0094] As a representative but non-limiting example, useful expression vectors for bacterial use can comprise a selectable marker and bacterial origin of replication derived from commercially available plasmids comprising genetic elements of the well known cloning vector pBR322 (ATCC 37017). Such commercial vectors include, for example, pKK223-3 (Pharmacia Fine Chemicals, Uppsala, Sweden) and GEM 1 (Promega Biotech, Madison, Wis., USA). These pBR322 “backbone” sections are combined with an appropriate promoter and the structural sequence to be expressed. Following transformation of a suitable host strain and growth of the host strain to an appropriate cell density, the selected promoter is induced or derepressed by appropriate means (e.g., temperature shift or chemical induction) and cells are cultured for an additional period. Cells are typically harvested by centrifugation, disrupted by physical or chemical means, and the resulting crude extract retained for further purification.

[0095] Polynucleotides of the invention can also be used to induce immune responses. For example, as described in Fan et al., Nat. Biotech 17, 870-872 (1999), incorporated herein by reference, nucleic acid sequences encoding a polypeptide may be used to generate antibodies against the encoded polypeptide following topical administration of naked plasmid DNA or following injection, and preferably intramuscular injection of the DNA. The nucleic acid sequences are preferably inserted in a recombinant expression vector and may be in the form of naked DNA.

[0096] 4.3 Antisense

[0097] Another aspect of the invention pertains to isolated antisense nucleic acid molecules that are hybridizable to or complementary to the nucleic acid molecule comprising the nucleotide sequence of SEQ ID NO: 1-244, or 489-706, or fragments, analogs or derivatives thereof. An “antisense” nucleic acid comprises a nucleotide sequence that is complementary to a “sense” nucleic acid encoding a protein, e.g., complementary to the coding strand of a double-stranded cDNA molecule or complementary to an mRNA sequence. In specific aspects, antisense nucleic acid molecules are provided that comprise a sequence complementary to at least about 10, 25, 50, 100, 250 or 500 nucleotides or an entire coding strand, or to only a portion thereof. Nucleic acid molecules encoding fragments, homologs, derivatives and analogs of a protein of any of SEQ ID NO: 1-244, or 489-706 or antisense nucleic acids complementary to a nucleic acid sequence of SEQ ID NO: 1-244, or 489-706 are additionally provided.

[0098] In one embodiment, an antisense nucleic acid molecule is antisense to a “coding region” of the coding strand of a nucleotide sequence of the invention. The term “coding region” refers to the region of the nucleotide sequence comprising codons which are translated into amino acid residues. In another embodiment, the antisense nucleic acid molecule is antisense to a “noncoding region” of the coding strand of a nucleotide sequence of the invention. The term “noncoding region” refers to 5′ and 3′ sequences that flank the coding region that are not translated into amino acids (i.e., also referred to as 5′ and 3 untranslated regions).

[0099] Given the coding strand sequences encoding a nucleic acid disclosed herein (e.g., SEQ ID NO: 1-244, or 489-706, antisense nucleic acids of the invention can be designed according to the rules of Watson and Crick or Hoogsteen base pairing. The antisense nucleic acid molecule can be complementary to the entire coding region of an mRNA, but more preferably is an oligonucleotide that is antisense to only a portion of the coding or noncoding region of an mRNA. For example, the antisense oligonucleotide can be complementary to the region surrounding the translation start site of an mRNA. An antisense oligonucleotide can be, for example, about 5, 10, 15, 20, 25, 30, 35, 40, 45 or 50 nucleotides in length. An antisense nucleic acid of the invention can be constructed using chemical synthesis or enzymatic ligation reactions using procedures known in the art. For example, an antisense nucleic acid (e.g., an antisense oligonucleotide) can be chemically synthesized using naturally occurring nucleotides or variously modified nucleotides designed to increase the biological stability of the molecules or to increase the physical stability of the duplex formed between the antisense and sense nucleic acids, e.g., phosphorothioate derivatives and acridine substituted nucleotides can be used.

[0100] Examples of modified nucleotides that can be used to generate the antisense nucleic acid include: 5-fluorouracil, 5-bromouracil, 5-chlorouracil, 5-iodouracil, hypoxanthine, xanthine, 4-acetylcytosine, 5-(carboxyhydroxylmethyl) uracil, 5-carboxymethylaminomethyl-2-thiouridine, 5-carboxymethylaminomethyluracil, dihydrouracil, beta-D-galactosylqueosine, inosine, N6-isopentenyladenine, 1-methylguanine, 1-methylinosine, 2,2-dimethylguanine, 2-methyladenine, 2-methylguanine, 3-methylcytosine, 5-methylcytosine, N6-adenine, 7-methylguanine, 5-methylaminomethyluracil, 5-methoxyaminomethyl-2-thiouracil, beta-D-mannosylqueosine, 5′-methoxycarboxymethyluracil, 5-methoxyuracil, 2-methylthio-N-6-isopentenyladenine, uracil-5-oxyacetic acid (v), wybutoxosine, pseudouracil, queosine, 2-thiocytosine, 5-methyl-2-thiouracil, 2-thiouracil, 4-thiouracil, 5-methyluracil, uracil-5-oxyacetic acid methylester, uracil-5-oxyacetic acid (v), 5-methyl-2-thiouracil, 3-(3-amino-3-N-2-carboxypropyl) uracil, (acp3)w, and 2,6-diaminopurine. Alternatively, the antisense nucleic acid can be produced biologically using an expression vector into which a nucleic acid has been subcloned in an antisense orientation (i.e., RNA transcribed from the inserted nucleic acid will be of an antisense orientation to a target nucleic acid of interest, described further in the following subsection).

[0101] The antisense nucleic acid molecules of the invention are typically administered to a subject or generated in situ such that they hybridize with or bind to cellular mRNA and/or genomic DNA encoding a protein according to the invention to thereby inhibit expression of the protein, e.g., by inhibiting transcription and/or translation. The hybridization can be by conventional nucleotide complementarity to form a stable duplex, or, for example, in the case of an antisense nucleic acid molecule that binds to DNA duplexes, through specific interactions in the major groove of the double helix. An example of a route of administration of antisense nucleic acid molecules of the invention includes direct injection at a tissue site. Alternatively, antisense nucleic acid molecules can be modified to target selected cells and then administered systemically. For example, for systemic administration, antisense molecules can be modified such that they specifically bind to receptors or antigens expressed on a selected cell surface, e.g., by linking the antisense nucleic acid molecules to peptides or antibodies that bind to cell surface receptors or antigens. The antisense nucleic acid molecules can also be delivered to cells using the vectors described herein. To achieve sufficient intracellular concentrations of antisense molecules, vector constructs in which the antisense nucleic acid molecule is placed under the control of a strong pol II or pol III promoter are preferred.

[0102] In yet another embodiment, the antisense nucleic acid molecule of the invention is an α-anomeric nucleic acid molecule. An α-anomeric nucleic acid molecule forms specific double-stranded hybrids with complementary RNA in which, contrary to the usual α-units, the strands run parallel to each other (Gaultier et al. (1987) Nucleic Acids Res 15: 6625-6641). The antisense nucleic acid molecule can also comprise a 2′-o-methylribonucleotide (Inoue et al. (1987) Nucleic Acids Res 15: 6131-6148) or a chimeric RNA-DNA analogue (Inoue et al. (1987) FEBS Left 215: 327-330).

[0103] 4.4 Ribozymes and PNA Moieties

[0104] In still another embodiment, an antisense nucleic acid of the invention is a ribozyme. Ribozymes are catalytic RNA molecules with ribonuclease activity that are capable of cleaving a single-stranded nucleic acid, such as an mRNA, to which they have a complementary region. Thus, ribozymes (e.g., hammerhead ribozymes (described in Haselhoff and Gerlach (1988) Nature 334:585-591)) can be used to catalytically cleave mRNA transcripts to thereby inhibit translation of an mRNA. A ribozyme having specificity for a nucleic acid of the invention can be designed based upon the nucleotide sequence of a DNA disclosed herein (i.e., SEQ ID NO: 1-244, or 489-706). For example, a derivative of Tetrahymena L-19 IVS RNA can be constructed in which the nucleotide sequence of the active site is complementary to the nucleotide sequence to be cleaved in a mRNA. See, e.g., Cech et al U.S. Pat. No. 4,987,071; and Cech et al. U.S. Pat. No. 5,116,742. Alternatively, mRNA of the invention can be used to select a catalytic RNA having a specific ribonuclease activity from a pool of RNA molecules. See, e.g., Bartel et al., (1993) Science 261:1411-1418.

[0105] Alternatively, gene expression can be inhibited by targeting nucleotide sequences complementary to the regulatory region (e.g., promoter and/or enhancers) to form triple helical structures that prevent transcription of the gene in target cells. See generally, Helene. (1991) Anticancer Drug Des. 6: 569-84; Helene. et al. (1992) Ann. N.Y. Acad. Sci. 660:27-36; and Maher (1992) Bioassays 14: 807-15.

[0106] In various embodiments, the nucleic acids of the invention can be modified at the base moiety, sugar moiety or phosphate backbone to improve, e.g., the stability, hybridization, or solubility of the molecule. For example, the deoxyribose phosphate backbone of the nucleic acids can be modified to generate peptide nucleic acids (see Hyrup et al. (1996) Bioorg Med Chem 4: 5-23). As used herein, the terms “peptide nucleic acids” or “PNAs” refer to nucleic acid mimics, e.g., DNA mimics, in which the deoxyribose phosphate backbone is replaced by a pseudopeptide backbone and only the four natural nucleobases are retained. The neutral backbone of PNAs has been shown to allow for specific hybridization to DNA and RNA under conditions of low ionic strength. The synthesis of PNA oligomers can be performed using standard solid phase peptide synthesis protocols as described in Hyrup et al. (1996) above; Perry-O'Keefe et al. (1996) PNAS 93: 14670-675.

[0107] PNAs of the invention can be used in therapeutic and diagnostic applications. For example, PNAs can be used as antisense or antigene agents for sequence-specific imodulation of gene expression by, e.g., inducing transcription or translation arrest or inhibiting replication. PNAs of the invention can also be used, e.g. in the analysis of single base pair mutations in a gene by, e.g, PNA directed PCR clamping; as artificial restriction enzymes when used in combination with other enzymes, e.g., S1 nucleases (Hyrup B. (1996) above); or as probes or primers for DNA sequence and hybridization (Hyrup et al. (1996), above; Perry-O'Keefe (1996), above).

[0108] In another embodiment, PNAs of the invention can be modified, e.g., to enhance their stability or cellular uptake, by attaching lipophilic or other helper groups to PNA, by the formation of PNA-DNA chimeras, or by the use of liposomes or other techniques of drug delivery known in the art. For example, PNA-DNA chimeras can be generated that may combine the advantageous properties of PNA and DNA. Such chimeras allow DNA recognition enzymes, e.g., RNase H and DNA polymerases, to interact with the DNA portion while the PNA portion would provide high binding affinity and specificity. PNA-DNA chimeras can be linked using linkers of appropriate lengths selected in terms of base stacking, number of bonds between the nucleobases, and orientation (Hyrup (1996) above). The synthesis of PNA-DNA chimeras can be performed as described in Hyrup (1996) above and Finn et al. (1996) Nucl Acids Res 24: 3357-63. For example, a DNA chain can be synthesized on a solid support using standard phosphoramidite coupling chemistry, and modified nucleoside analogs, e.g., 5′-(4-methoxytrityl)amino-5′-deoxy-thyrnidine phosphoramidite, can be used between the PNA and the 5′ end of DNA (Mag et al. (1989) Nucl Acid Res 17: 5973-88). PNA monomers are then coupled in a stepwise manner to produce a chimeric molecule with a 5′ PNA segment and a 3′ DNA segment (Finn et al, (1996) above). Alternatively, chimeric molecules can be synthesized with a 5′ DNA segment and a 3′ PNA segment. See, Petersen et al. (1975) Bioorg Med Chem Lett 5: 1119-11124.

[0109] In other embodiments, the oligonucleotide may include other appended groups such as peptides (e.g., for targeting host cell receptors in vivo), or agents facilitating transport across the cell membrane (see, e.g., Letsinger et al., 1989, Proc. Natl. Acad. Sci. U.S.A. 86:6553-6556; Lemaitre et al., 1987, Proc. Natl. Acad. Sci. 84:648-652; PCT Publication No. WO88/09810) or the blood-brain barrier (see, e.g., PCT Publication No. WO89/10134). In addition, oligonucleotides can be modified with hybridization triggered cleavage agents (See, e.g., Krol et al., 1988, Biotechniques 6:958-976) or intercalating agents. (See, e.g., Zon, 1988, Pharm. Res. 5: 539-549). To this end, the oligonucleotide may be conjugated to another molecule, e.g., a peptide, a hybridization triggered cross-linking agent, a transport agent, a hybridization-triggered cleavage agent, etc.

[0110] 4.5 Hosts

[0111] The present invention further provides host cells genetically engineered to contain the polynucleotides of the invention. For example, such host cells may contain nucleic acids of the invention introduced into the host cell using known transformation, transfection or infection methods. The present invention still further provides host cells genetically engineered to express the polynucleotides of the invention, wherein such polynucleotides are in operative association with a regulatory sequence heterologous to the host cell which drives expression of the polynucleotides in the cell.

[0112] Knowledge of nucleic acid sequences allows for modification of cells to permit, or increase, expression of endogenous polypeptide. Cells can be modified (e.g., by homologous recombination) to provide increased polypeptide expression by replacing, in whole or in part, the naturally occurring promoter with all or part of a heterologous promoter so that the cells express the polypeptide at higher levels. The heterologous promoter is inserted in such a manner that it is operatively linked to the encoding sequences. See, for example, PCT International Publication No. WO94/12650, PCT International Publication No. WO92/20808, and PCT International Publication No. WO91/09955. It is also contemplated that, in addition to heterologous promoter DNA, amplifiable marker DNA (e.g., ada, dhfr, and the multifunctional CAD gene which encodes carbamyl phosphate synthase, aspartate transcarbamylase, and dihydroorotase) and/or intron DNA may be inserted along with the heterologous promoter DNA. If linked to the coding sequence, amplification of the marker DNA by standard selection methods results in co-amplification of the desired protein coding sequences in the cells.

[0113] The host cell can be a higher eukaryotic host cell, such as a mammalian cell, a lower eukaryotic host cell, such as a yeast cell, or the host cell can be a prokaryotic cell, such as a bacterial cell. Introduction of the recombinant construct into the host cell can be effected by calcium phosphate transfection, DEAE, dextran mediated transfection, or electroporation (Davis, L. et al., Basic Methods in Molecular Biology (1986)). The host cells containing one of the polynucleotides of the invention, can be used in conventional manners to produce the gene product encoded by the isolated fragment (in the case of an ORF) or can be used to produce a heterologous protein under the control of the EMF.

[0114] Any host/vector system can be used to express one or more of the ORFs of the present invention. These include, but are not limited to, eukaryotic hosts such as HeLa cells, Cv-1 cell, COS cells, 293 cells, and Sf9 cells, as well as prokaryotic host such as E. coli and B. subtilis. The most preferred cells are those which do not normally express the particular polypeptide or protein or which expresses the polypeptide or protein at low natural level. Mature proteins can be expressed in mammalian cells, yeast, bacteria, or other cells under the control of appropriate promoters. Cell-free translation systems can also be employed to produce such proteins using RNAs derived from the DNA constructs of the present invention. Appropriate cloning and expression vectors for use with prokaryotic and eukaryotic hosts are described by Sambrook, et al., in Molecular Cloning: A Laboratory Manual, Second Edition, Cold Spring Harbor, N.Y. (1989), the disclosure of which is hereby incorporated by reference.

[0115] Various mammalian cell culture systems can also be employed to express recombinant protein. Examples of mammalian expression systems include the COS-7 lines of monkey kidney fibroblasts, described by Gluzman, Cell 23:175 (1981). Other cell lines capable of expressing a compatible vector are, for example, the C127, monkey COS cells, Chinese Hamster Ovary (CHO) cells, human kidney 293 cells, human epidermal A431 cells, human Colo205 cells, 3 T3 cells, CV-1 cells, other transformed primate cell lines, normal diploid cells, cell strains derived from in vitro culture of primary tissue, primary explants, HeLa cells, mouse L cells, BHK, 1HL-60, U937, HaK or Jurkat cells. Mammalian expression vectors will comprise an origin of replication, a suitable promoter and also any necessary ribosome binding sites, polyadenylation site, splice donor and acceptor sites, transcriptional termination sequences, and 5′ flanking nontranscribed sequences. DNA sequences derived from the SV40 viral genome, for example, SV40 origin, early promoter, enhancer, splice, and polyadenylation sites may be used to provide the required nontranscribed genetic elements. Recombinant polypeptides and proteins produced in bacterial culture are usually isolated by initial extraction from cell pellets, followed by one or more salting-out, aqueous ion exchange or size exclusion chromatography steps. Protein refolding steps can be used, as necessary, in completing configuration of the mature protein. Finally, high performance liquid chromatography (HPLC) can be employed for final purification steps. Microbial cells employed in expression of proteins can be disrupted by any convenient method, including freeze-thaw cycling, sonication, mechanical disruption, or use of cell lysing agents.

[0116] Alternatively, it may be possible to produce the protein in lower eukaryotes such as yeast or insects or in prokaryotes such as bacteria. Potentially suitable yeast strains include Saccharomyces cerevisiae, Schizosaccharomyces pombe, Kluyveromyces strains, Candida, or any yeast strain capable of expressing heterologous proteins. Potentially suitable bacterial strains include Escherichia coli, Bacillus subtilis, Salmonella typhimurium, or any bacterial strain capable of expressing heterologous proteins. If the protein is made in yeast or bacteria, it may be necessary to modify the protein produced therein, for example by phosphorylation or glycosylation of the appropriate sites, in order to obtain the functional protein. Such covalent attachments may be accomplished using known chemical or enzymatic methods.

[0117] In another embodiment of the present invention, cells and tissues may be engineered to express an endogenous gene comprising the polynucleotides of the invention under the control of inducible regulatory elements, in which case the regulatory sequences of the endogenous gene may be replaced by homologous recombination. As described herein, gene targeting can be used to replace a gene's existing regulatory region with a regulatory sequence isolated from a different gene or a novel regulatory sequence synthesized by genetic engineering methods. Such regulatory sequences may be comprised of promoters, enhancers, scaffold-attachment regions, negative regulatory elements, transcriptional initiation sites, and regulatory protein binding sites or combinations of said sequences. Alternatively, sequences which affect the structure or stability of the RNA or protein produced may be replaced, removed, added, or otherwise modified by targeting. These sequence include polyadenylation signals, mRNA stability elements, splice sites, leader sequences for enhancing or modifying transport or secretion properties of the protein, or other sequences which alter or improve the function or stability of protein or RNA molecules.

[0118] The targeting event may be a simple insertion of the regulatory sequence, placing the gene under the control of the new regulatory sequence, e.g., inserting a new promoter or enhancer or both upstream of a gene. Alternatively, the targeting event may be a simple deletion of a regulatory element, such as the deletion of a tissue-specific negative regulatory element. Alternatively, the targeting event may replace an existing element; for example, a tissue-specific enhancer can be replaced by an enhancer that has broader or different cell-type specificity than the naturally occurring elements. Here, the naturally occurring sequences are deleted and new sequences are added. In all cases, the identification of the targeting event may be facilitated by the use of one or more selectable marker genes that are contiguous with the targeting DNA, allowing for the selection of cells in which the exogenous DNA has integrated into the host cell genome. The identification of the targeting event may also be facilitated by the use of one or more marker genes exhibiting the property of negative selection, such that the negatively selectable marker is linked to the exogenous DNA, but configured such that the negatively selectable marker flanks the targeting sequence, and such that a correct homologous recombination event with sequences in the host cell genome does not result in the stable integration of the negatively selectable marker. Markers useful for this purpose include the Herpes Simplex Virus thymidine kinase (TK) gene or the bacterial xanthine-guanine phosphoribosyl-transferase (gpt) gene.

[0119] The gene targeting or gene activation techniques which can be used in accordance with this aspect of the invention are more particularly described in U.S. Pat. No. 5,272,071 to Chappel; U.S. Pat. No. 5,578,461 to Sherwin et al.; International Application No. PCT/US92/09627 (WO93/09222) by Selden et al.; and International Application No. PCT/US90/06436 (WO91/06667) by Skoultchi et al., each of which is incorporated by reference herein in its entirety.

[0120] 4.6 Polypeptides of the Invention

[0121] The isolated polypeptides of the invention include, but are not limited to, a polypeptide comprising: the amino acid sequences set forth as any one of SEQ ID NO: 245-488, or 707-924 or an amino acid sequence encoded by any one of the nucleotide sequences SEQ ID NO: 1-244, or 489-706 or the corresponding full length or mature protein. Polypeptides of the invention also include polypeptides preferably with biological or immunological activity that are encoded by: (a) a polynucleotide having any one of the nucleotide sequences set forth in SEQ ID NO: 1-244, or 489-706 or (b) polynucleotides encoding any one of the amino acid sequences set forth as SEQ ID NO: 245-488, or 707-924 or (c) polynucleotides that hybridize to the complement of the polynucleotides of either (a) or (b) under stringent hybridization conditions. The invention also provides biologically active or immunologically active variants of any of the amino acid sequences set forth as SEQ ID NO: 245-488, or 707-924 or the corresponding full length or mature protein; and “substantial equivalents” thereof (e.g., with at least about 65%, at least about 70%, at least about 75%, at least about 80%, at least about 85%, 86%, 87%, 88%, 89%, at least about 90%, 91%, 92%, 93%, 94%, typically at least about 95%, 96%, 97%, more typically at least about 98%, or most typically at least about 99% amino acid identity) that retain biological activity. Polypeptides encoded by allelic variants may have a similar, increased, or decreased activity compared to polypeptides comprising SEQ ID NO: 245-488, or 707-924.

[0122] Fragments of the proteins of the present invention which are capable of exhibiting biological activity are also encompassed by the present invention. Fragments of the protein may be in linear form or they may be cyclized using known methods, for example, as described in H. U. Saragovi, et al., Bio/Technology 10, 773-778 (1992) and in R. S. McDowell, et al., J. Amer. Chem. Soc. 114, 9245-9253 (1992), both of which are incorporated herein by reference. Such fragments may be fused to carrier molecules such as immunoglobulins for many purposes, including increasing the valency of protein binding sites. Fragments are also identified in Tables 3, 5, 6, and 8. The present invention also provides both full-length and mature forms (for example, without a signal sequence or precursor sequence) of the disclosed proteins. The protein coding sequence is identified in the sequence listing by translation of the disclosed nucleotide sequences. The predicted signal sequence is set forth in Table 6.

[0123] The mature form of such protein may be obtained and confirmed by expression of a full-length polynucleotide in a suitable mammalian cell or other host cell and sequencing of the cleaved product. One of skill in the art will recognize that the actual cleavage site may be different than that predicted in Table 6. The sequence of the mature form of the protein is also determinable from the amino acid sequence of the full-length form. Where proteins of the present invention are membrane bound, soluble forms of the proteins are also provided. In such forms, part or all of the regions causing the proteins to be membrane bound are deleted so that the proteins are fully secreted from the cell in which they are expressed.

[0124] Protein compositions of the present invention may further comprise an acceptable carrier, such as a hydrophilic, e.g., pharmaceutically acceptable, carrier. The present invention further provides isolated polypeptides encoded by the nucleic acid fragments of the present invention or by degenerate variants of the nucleic acid fragments of the present invention. By “degenerate variant” is intended nucleotide fragments which differ from a nucleic acid fragment of the present invention (e.g., an ORF) by nucleotide sequence but, due to the degeneracy of the genetic code, encode an identical polypeptide sequence. Preferred nucleic acid fragments of the present invention are the ORFs that encode proteins.

[0125] A variety of methodologies known in the art can be utilized to obtain any one of the isolated polypeptides or proteins of the present invention. At the simplest level, the amino acid sequence can be synthesized using commercially available peptide synthesizers. The synthetically-constructed protein sequences, by virtue of sharing primary, secondary or tertiary structural and/or conformational characteristics with proteins may possess biological properties in common therewith, including protein activity. This technique is particularly useful in producing small peptides and fragments of larger polypeptides. Fragments are useful, for example, in generating antibodies against the native polypeptide. Thus, they may be employed as biologically active or immunological substitutes for natural, purified proteins in screening of therapeutic compounds and in immunological processes for the development of antibodies.

[0126] The polypeptides and proteins of the present invention can alternatively be purified from cells which have been altered to express the desired polypeptide or protein. As used herein, a cell is said to be altered to express a desired polypeptide or protein when the cell, through genetic manipulation, is made to produce a polypeptide or protein which it normally does not produce or which the cell normally produces at a lower level. One skilled in the art can readily adapt procedures for introducing and expressing either recombinant or synthetic sequences into eukaryotic or prokaryotic cells in order to generate a cell which produces one of the polypeptides or proteins of the present invention.

[0127] The invention also relates to methods for producing a polypeptide comprising growing a culture of host cells of the invention in a suitable culture medium, and purifying the protein from the cells or the culture in which the cells are grown. For example, the methods of the invention include a process for producing a polypeptide in which a host cell containing a suitable expression vector that includes a polynucleotide of the invention is cultured under conditions that allow expression of the encoded polypeptide. The polypeptide can be recovered from the culture, conveniently from the culture medium, or from a lysate prepared from the host cells and further purified. Preferred embodiments include those in which the protein produced by such process is a fill length or mature form of the protein.

[0128] In an alternative method, the polypeptide or protein is purified from bacterial cells which naturally produce the polypeptide or protein. One skilled in the art can readily follow known methods for isolating polypeptides and proteins in order to obtain one of the isolated polypeptides or proteins of the present invention. These include, but are not limited to, immunochromatography, BPLC, size-exclusion chromatography, ion-exchange chromatography, and immuno-affinity chromatography. See, e.g., Scopes, Protein Purification: Principles and Practice, Springer-Verlag (1994); Sambrook, et al., in Molecular Cloning: A Laboratory Manual; Ausubel et al., Current Protocols in Molecular Biology. Polypeptide fragments that retain biological/immunological activity include fragments comprising greater than about 100 amino acids, or greater than about 200 amino acids, and fragments that encode specific protein domains.

[0129] The purified polypeptides can be used in in vitro binding assays which are well known in the art to identify molecules which bind to the polypeptides. These molecules include but are not limited to, for e.g., small molecules, molecules from combinatorial libraries, antibodies or other proteins. The molecules identified in the binding assay are then tested for antagonist or agonist activity in in vivo tissue culture or animal models that are well known in the art. In brief, the molecules are titrated into a plurality of cell cultures or animals and then tested for either cell/animal death or prolonged survival of the animal/cells.

[0130] In addition, the peptides of the invention or molecules capable of binding to the peptides may be complexed with toxins, e.g., ricin or cholera, or with other compounds that are toxic to cells. The toxin-binding molecule complex is then targeted to a tumor or other cell by the specificity of the binding molecule for SEQ ID NO: 245-488, or 707-924.

[0131] The protein of the invention may also be expressed as a product of transgenic animals, e.g., as a component of the milk of transgenic cows, goats, pigs, or sheep which are characterized by somatic or germ cells containing a nucleotide sequence encoding the protein.

[0132] The proteins provided herein also include proteins characterized by amino acid sequences similar to those of purified proteins but into which modification are naturally provided or deliberately engineered. For example, modifications, in the peptide or DNA sequence, can be made by those skilled in the art using known techniques. Modifications of interest in the protein sequences may include the alteration, substitution, replacement, insertion or deletion of a selected amino acid residue in the coding sequence. For example, one or more of the cysteine residues may be deleted or replaced with another amino acid to alter the conformation of the molecule. Techniques for such alteration, substitution, replacement, insertion or deletion are well known to those skilled in the art (see, e.g., U.S. Pat. No. 4,518,584). Preferably, such alteration, substitution, replacement, insertion or deletion retains the desired activity of the protein. Regions of the protein that are important for the protein function can be determined by various methods known in the art including the alanine-scanning method which involved systematic substitution of single or strings of amino acids with alanine, followed by testing the resulting alanine-containing variant for biological activity. This type of analysis determines the importance of the substituted amino acid(s) in biological activity. Regions of the protein that are important for protein function may be determined by the eMATRIX program.

[0133] Other fragments and derivatives of the sequences of proteins which would be expected to retain protein activity in whole or in part and are useful for screening or other immunological methodologies may also be easily made by those skilled in the art given the disclosures herein. Such modifications are encompassed by the present invention.

[0134] The protein may also be produced by operably linking the isolated polynucleotide of the invention to suitable control sequences in one or more insect expression vectors, and employing an insect expression system. Materials and methods for baculovirus/insect cell expression systems are commercially available in kit form from, e.g., Invitrogen, San Diego, Calif., U.S.A (the MaxBat™ kit), and such methods are well known in the art, as described in Summers and Smith, Texas Agricultural Experiment Station Bulletin No. 1555 (1987), incorporated herein by reference. As used herein, an insect cell capable of expressing a polynucleotide of the present invention is “transformed.

[0135] The protein of the invention may be prepared by culturing transformed host cells under culture conditions suitable to express the recombinant protein. The resulting expressed protein may then be purified from such culture (i.e., from culture medium or cell extracts) using known purification processes, such as gel filtration and ion exchange chromatography. The purification of the protein may also include an affinity column containing agents which will bind to the protein; one or more column steps over such affinity resins as concanavalin A-agarose, heparin-toyopearl™ or Cibacrom blue 3GA Sepharose™; one or more steps involving hydrophobic interaction chromatography using such resins as phenyl ether, butyl ether, or propyl ether; or immunoaffinity chromatography.

[0136] Alternatively, the protein of the invention may also be expressed in a form which will facilitate purification. For example, it may be expressed as a fusion protein, such as those of maltose binding protein (MBP), glutathione-S-transferase (GST) or thioredoxin (TRX), or as a His tag. Kits for expression and purification of such fusion proteins are commercially available from New England BioLab (Beverly, Mass.), Pharmacia (Piscataway, N.J.) and Invitrogen, respectively. The protein can also be tagged with an epitope and subsequently purified by using a specific antibody directed to such epitope. One such epitope (“FLAG® ”) is commercially available from Kodak (New Haven, Conn.).

[0137] Finally, one or more reverse-phase high performance liquid chromatography (RP-HPLC) steps employing hydrophobic RP-BPLC media, e.g., silica gel having pendant methyl or other aliphatic groups, can be employed to further purify the protein. Some or all of the foregoing purification steps, in various combinations, can also be employed to provide a substantially homogeneous isolated recombinant protein. The protein thus purified is substantially free of other mammalian proteins and is defined in accordance with the present invention as an “isolated protein.”

[0138] The polypeptides of the invention include analogs (variants). This embraces fragments, as well as peptides in which one or more amino acids has been deleted, inserted, or substituted. Also, analogs of the polypeptides of the invention embrace fusions of the polypeptides or modifications of the polypeptides of the invention, wherein the polypeptide or analog is fused to another moiety or moieties, e.g., targeting moiety or another therapeutic agent. Such analogs may exhibit improved properties such as activity and/or stability. Examples of moieties which may be fused to the polypeptide or an analog include, for example, targeting moieties which provide for the delivery of polypeptide to pancreatic cells, e.g., antibodies to pancreatic cells, antibodies to immune cells such as T-cells, monocytes, dendritic cells, granulocytes, etc., as well as receptor and ligands expressed on pancreatic or immune cells. Other moieties which may be fused to the polypeptide include therapeutic agents which are used for treatment, for example, immunosuppressive drugs such as cyclosporin, SK506, azathioprine, CD3 antibodies and steroids. Also, polypeptides may be fused to immune modulators, and other cytokines such as alpha or beta interferon.

[0139] 4.6.1 Determining Polypeptide and Polynucleotide Identity and Similarity

[0140] Preferred identity and/or similarity are designed to give the largest match between the sequences tested. Methods to determine identity and similarity are codified in computer programs including, but are not limited to, the GCG program package, including GAP (Devereux, J., et al., Nucleic Acids Research 12(1):387 (1984); Genetics Computer Group, University of Wisconsin, Madison, Wis.), BLASTP, BLASTN, BLASTX, FASTA (Altschul, S. F. et al., J. Molec. Biol. 215:403-410 (1990), PSI-BLAST (Altschul S. F. et al., Nucleic Acids Res. vol. 25, pp. 3389-3402, herein incorporated by reference), eMatrix software (Wu et al., J. Comp. Biol., Vol. 6, pp. 219-235 (1999), herein incorporated by reference), eMotif software (Nevill-Manning et at, ISMB-97, Vol. 4, pp. 202-209, herein incorporated by reference), Pfam software (Sonnhammer et al., Nucleic Acids Res., Vol. 26(1), pp. 320-322 (1998), herein incorporated by reference) and the Kyte-Doolittle hydrophobocity prediction algorithm (J. Mol Biol, 157, pp. 105-31 (1982), incorporated herein by reference). polypeptide sequences were examined by a proprietary algorithm, SeqLoc that separates the proteins into three sets of locales: intracellular, membrane, or secreted. This prediction is based upon three characteristics of each polypeptide, including percentage of cysteine residues, Kyte-Doolittle scores for the first 20 amino acids of each protein, and Kyte-Doolittle scores to calculate the longest hydrophobic stretch of the said protein. Values of predicted proteins are compared against the values from a set of 592 proteins of known cellular localization from the Swissprot database (http://www.expasy.ch/sprot). Predictions are based upon the maximum likelihood estimation.

[0141] The BLAST programs are publicly available from the National Center for Biotechnology Information (NCBI) and other sources (BLAST Manual, Altschul, S., et al. NCBI NLM NIH Bethesda, Md. 20894; Altschul, S., et al., J. Mol. Biol. 215:403-410 (1990).

[0142] 4.7 Chimeric and Fusion Proteins

[0143] The invention also provides chimeric or fission proteins. As used herein, a “chimeric protein” or “fusion protein” comprises a polypeptide of the invention operatively linked to another polypeptide. Within a fusion protein the polypeptide according to the invention can correspond to all or a portion of a protein according to the invention. In one embodiment, a fusion protein comprises at least one biologically active portion of a protein according to the invention. In another embodiment, a fusion protein comprises at least two biologically active portions of a protein according to the invention. Within the fusion protein, the term “operatively linked” is intended to indicate that the polypeptide according to the invention and the other polypeptide are fused in-frame to each other. The polypeptide can be fused to the N-terminus or C-terminus, or to the middle.

[0144] For example, in one embodiment a fusion protein comprises a polypeptide according to the invention operably linked to the extracellular domain of a second protein.

[0145] In another embodiment, the fusion protein is a GST-fusion protein in which the polypeptide sequences of the invention are fused to the C-terminus of the GST (i.e., glutathione S-transferase) sequences.

[0146] In another embodiment, the fusion protein is an immunoglobulin fusion protein in which the polypeptide sequences according to the invention comprise one or more domains fused to sequences derived from a member of the immunoglobulin protein family. The immunoglobulin fusion proteins of the invention can be incorporated into pharmaceutical compositions and administered to a subject to inhibit an interaction between a ligand and a protein of the invention on the surface of a cell, to thereby suppress signal transduction in vivo. The immunoglobulin fusion proteins can be used to affect the bioavailability of a cognate ligand. Inhibition of the ligand/protein interaction may be useful therapeutically for both the treatment of proliferative and differentiative disorders, e.g., cancer as well as modulating (e.g., promoting or inhibiting) cell survival. Moreover, the immunoglobulin fusion proteins of the invention can be used as immunogens to produce antibodies in a subject, to purify ligands, and in screening assays to identify molecules that inhibit the interaction of a polypeptide of the invention with a ligand.

[0147] A chimeric or fusion protein of the invention can be produced by standard recombinant DNA techniques. For example, DNA fragments coding for the different polypeptide sequences are ligated together in-frame in accordance with conventional techniques, e.g., by employing blunt-ended or stagger-ended termini for ligation, restriction enzyme digestion to provide for appropriate termini, filling-in of cohesive ends as appropriate, alkaline phosphatase treatment to avoid undesirable joining, and enzymatic ligation. In another embodiment, the fusion gene can be synthesized by conventional techniques including automated DNA synthesizers. Alternatively, PCR amplification of gene fragments can be carried out using anchor primers that give rise to complementary overhangs between two consecutive gene fragments that can subsequently be annealed and reamplified to generate a chimeric gene sequence (see, for example, Ausubel et al. (eds.) CURRENT PROTOCOLS IN MOLECULAR BIOLOGY, John Wiley & Sons, 1992). Moreover, many expression vectors are commercially available that already encode a fusion moiety (e.g., a GST polypeptide). A nucleic acid encoding a polypeptide of the invention can be cloned into such an expression vector such that the fusion moiety is linked in-frame to the protein of the invention.

[0148] 4.8 Gene Therapy

[0149] Mutations in the polynucleotides of the invention gene may result in loss of normal function of the encoded protein. The invention thus provides gene therapy to restore normal activity of the polypeptides of the invention; or to treat disease states involving polypeptides of the invention. Delivery of a functional gene encoding polypeptides of the invention to appropriate cells is effected ex vivo, in situ, or in vivo by use of vectors, and more particularly viral vectors (e.g., adenovirus, adeno-associated virus, or a retrovirus), or ex vivo by use of physical DNA transfer methods (e.g., liposomes or chemical treatments). See, for example, Anderson, Nature, supplement to vol. 392, no. 6679, pp.25-20 (1998). For additional reviews of gene therapy technology see Friedmann, Science, 244: 1275-1281 (1989); Verma, Scientific American: 68-84 (1990); and Miller, Nature, 357: 455-460 (1992). Introduction of any one of the nucleotides of the present invention or a gene encoding the polypeptides of the present invention can also be accomplished with extrachromosomal substrates (transient expression) or artificial chromosomes (stable expression). Cells may also be cultured ex vivo in the presence of proteins of the present invention in order to proliferate or to produce a desired effect on or activity in such cells. Treated cells can then be introduced in vivo for therapeutic purposes. Alternatively, it is contemplated that in other human disease states, preventing the expression of or inhibiting the activity of polypeptides of the invention will be useful in treating the disease states. It is contemplated that antisense therapy or gene therapy could be applied to negatively regulate the expression of polypeptides of the invention.

[0150] Other methods inhibiting expression of a protein include the introduction of antisense molecules to the nucleic acids of the present invention, their complements, or their translated RNA sequences, by methods known in the art. Further, the polypeptides of the present invention can be inhibited by using targeted deletion methods, or the insertion of a negative regulatory element such as a silencer, which is tissue specific.

[0151] The present invention still further provides cells genetically engineered in vivo to express the polynucleotides of the invention, wherein such polynucleotides are in operative association with a regulatory sequence heterologous to the host cell which drives expression of the polynucleotides in the cell. These methods can be used to increase or decrease the expression of the polynucleotides of the present invention.

[0152] Knowledge of DNA sequences provided by the invention allows for modification of cells to permit, increase, or decrease, expression of endogenous polypeptide. Cells can be modified (e.g., by homologous recombination) to provide increased polypeptide expression by replacing, in whole or in part, the naturally occurring promoter with all or part of a heterologous promoter so that the cells express the protein at higher levels. The heterologous promoter is inserted in such a manner that it is operatively linked to the desired protein encoding sequences. See, for example, PCT International Publication No. WO 94/12650, PCT International Publication No. WO 92/20808, and PCT International Publication No. WO 91/09955. It is also contemplated that, in addition to heterologous promoter DNA, amplifiable marker DNA (e.g., ada, dhfr, and the multifunctional CAD gene which encodes carbamyl phosphate synthase, aspartate transcarbamylase, and dihydroorotase) and/or intron DNA may be inserted along with the heterologous promoter DNA If linked to the desired protein coding sequence, amplification of the marker DNA by standard selection methods results in co-amplification of the desired protein coding sequences in the cells.

[0153] In another embodiment of the present invention, cells and tissues may be engineered to express an endogenous gene comprising the polynucleotides of the invention under the control of inducible regulatory elements, in which case the regulatory sequences of the endogenous gene may be replaced by homologous recombination. As described herein, gene targeting can be used to replace a gene's existing regulatory region with a regulatory sequence isolated from a different gene or a novel regulatory sequence synthesized by genetic engineering methods. Such regulatory sequences may be comprised of promoters, enhancers, scaffold-attachment regions, negative regulatory elements, transcriptional initiation sites, regulatory protein binding sites or combinations of said sequences. Alternatively, sequences which affect the structure or stability of the RNA or protein produced may be replaced, removed, added, or otherwise modified by targeting. These sequences include polyadenylation signals, mRNA stability elements, splice sites, leader sequences for enhancing or modifying transport or secretion properties of the protein, or other sequences which alter or improve the function or stability of protein or RNA molecules.

[0154] The targeting event may be a simple insertion of the regulatory sequence, placing the gene under the control of the new regulatory sequence, e.g, inserting a new promoter or enhancer or both upstream of a gene. Alternatively, the targeting event may be a simple deletion of a regulatory element, such as the deletion of a tissue-specific negative regulatory element. Alternatively, the targeting event may replace an existing element; for example, a tissue-specific enhancer can be replaced by an enhancer that has broader or different cell-type specificity than the naturally occurring elements. Here, the naturally occurring sequences are deleted and new sequences are added. In all cases, the identification of the targeting event may be facilitated by the use of one or more selectable marker genes that are contiguous with the targeting DNA, allowing for the selection of cells in which the exogenous DNA has integrated into the cell genome. The identification of the targeting event may also be facilitated by the use of one or more marker genes exhibiting the property of negative selection, such that the negatively selectable marker is linked to the exogenous DNA, but configured such that the negatively selectable marker flanks the targeting sequence, and such that a correct homologous recombination event with sequences in the host cell genome does not result in the stable integration of the negatively selectable marker. Markers useful for this purpose include the Herpes Simplex Virus thymidine kinase (TK) gene or the bacterial xanthine-guanine phosphoribosyl-transferase (gpt) gene.

[0155] The gene targeting or gene activation techniques which can be used in accordance with this aspect of the invention are more particularly described in U.S. Pat. No. 5,272,071 to Chappel; U.S. Pat. No. 5,578,461 to Sherwin et al.; International Application No. PCT/US92/09627 (WO93/09222) by Selden et al.; and International Application No. PCT/US90/06436 (WO91/06667) by Skoultchi et al., each of which is incorporated by reference herein in its entirety,

[0156] 4.9 Transgenic Animals

[0157] In preferred methods to determine biological functions of the polypeptides of the invention in vivo, one or more genes provided by the invention are either over expressed or inactivated in the germ line of animals using homologous recombination [Capecchi, Science 244:1288-1292 (1989)]. Animals in which the gene is over expressed, under the regulatory control of exogenous or endogenous promoter elements, are known as transgenic animals. Animals in which an endogenous gene has been inactivated by homologous recombination are referred to as “knockout” animals. Knockout animals, preferably non-human mammals, can be prepared as described in U.S. Pat. No. 5,557,032, incorporated herein by reference. Transgenic animals are useful to determine the roles polypeptides of the invention play in biological processes, and preferably in disease states. Transgenic animals are useful as model systems to identify compounds that modulate lipid metabolism. Transgenic animals, preferably nonhuman mammals, are produced using methods as described in U.S. Pat. No. 5,489,743 and PCT Publication No. WO94/28122, incorporated herein by reference. Transgenic animals can be prepared wherein all or part of a promoter of the polynucleotides of the invention is either activated or inactivated to alter the level of expression of the polypeptides of the invention. Inactivation can be carried out using homologous recombination methods described above. Activation can be achieved by supplementing or even replacing the homologous promoter to provide for increased protein expression. The homologous promoter can be supplemented by insertion of one or more heterologous enhancer elements known to confer promoter activation in a particular tissue.

[0158] The polynucleotides of the present invention also make possible the development, through, e.g., homologous recombination or knock out strategies, of animals that fail to express polypeptides of the invention or that express a variant polypeptide. Such animals are useful as models for studying the in vivo activities of polypeptide as well as for studying modulators of the polypeptides of the invention.

[0159] In preferred methods to determine biological functions of the polypeptides of the invention in vivo, one or more genes provided by the invention are either over expressed or inactivated in the germ line of animals using homologous recombination [Capecchi, Science 244:1288-1292 (1989)]. Animals in which the gene is over expressed, under the regulatory control of exogenous or endogenous promoter elements, are known as transgenic animals. Animals in which an endogenous gene has been inactivated by homologous recombination are referred to as “knockout” animals. Knockout animals, preferably non-human mammals, can be prepared as described in U.S. Pat. No. 5,557,032, incorporated herein by reference. Transgenic animals are useful to determine the roles polypeptides of the invention play in biological processes, and preferably in disease states. Transgenic animals are useful as model systems to identify compounds that modulate lipid metabolism. Transgenic animals, preferably non-human mammals, are produced using methods as described in U.S. Pat. No. 5,489,743 and PCT Publication No. WO94/28122, incorporated herein by reference.

[0160] Transgenic animals can be prepared wherein all or part of the polynucleotides of the invention promoter is either activated or inactivated to alter the level of expression of the polypeptides of the invention. Inactivation can be carried out using homologous recombination methods described above. Activation can be achieved by supplementing or even replacing the homologous promoter to provide for increased protein expression. The homologous promoter can be supplemented by insertion of one or more heterologous enhancer elements known to confer promoter activation in a particular tissue.

[0161] 4.10 Uses and Biological Activity

[0162] The polynucleotides and proteins of the present invention are expected to exhibit one or more of the uses or biological activities (including those associated with assays cited herein) identified herein. Uses or activities described for proteins of the present invention may be provided by administration or use of such proteins or of polynucleotides encoding such proteins (such as, for example, in gene therapies or vectors suitable for introduction of DNA). The mechanism underlying the particular condition or pathology will dictate whether the polypeptides of the invention, the polynucleotides of the invention or modulators (activators or inhibitors) thereof would be beneficial to the subject in need of treatment. Thus, “therapeutic compositions of the invention” include compositions comprising isolated polynucleotides (including recombinant DNA molecules, cloned genes and degenerate variants thereof) or polypeptides of the invention (including full length protein, mature protein and truncations or domains thereof), or compounds and other substances that modulate the overall activity of the target gene products, either at the level of target gene/protein expression or target protein activity. Such modulators include polypeptides, analogs, (variants), including fragments and fusion proteins, antibodies and other binding proteins; chemical compounds that directly or indirectly activate or inhibit the polypeptides of the invention (identified, e.g., via drug screening assays as described herein); antisense polynucleotides and polynucleotides suitable for triple helix formation; and in particular antibodies or other binding partners that specifically recognize one or more epitopes of the polypeptides of the invention.

[0163] The polypeptides of the present invention may likewise be involved in cellular activation or in one of the other physiological pathways described herein.

[0164] 4.10.1 Research Uses and Utilities

[0165] The polynucleotides provided by the present invention can be used by the research community for various purposes. The polynucleotides can be used to express recombinant protein for analysis, characterization or therapeutic use; as markers for tissues in which the corresponding protein is preferentially expressed (either constitutively or at a particular stage of tissue differentiation or development or in disease states); as molecular weight markers on gels; as chromosome markers or tags (when labeled) to identify chromosomes or to map related gene positions; to compare with endogenous DNA sequences in patients to identify potential genetic disorders; as probes to hybridize and thus discover novel, related DNA sequences; as a source of information to derive PCR primers for genetic fingerprinting; as a probe to “subtract-out” known sequences in the process of discovering other novel polynucleotides; for selecting and making oligomers for attachment to a “gene chip” or other support, including for examination of expression patterns; to raise anti-protein antibodies using DNA immunization techniques; and as an antigen to raise anti-DNA antibodies or elicit another immune response. Where the polynucleotide encodes a protein which binds or potentially binds to another protein (such as, for example, in a receptor-ligand interaction), the polynucleotide can also be used in interaction trap assays (such as, for example, that described in Gyuris et al., Cell 75:791-803 (1993)) to identify polynucleotides encoding the other protein with which binding occurs or to identify inhibitors of the binding interaction.

[0166] The polypeptides provided by the present invention can similarly be used in assays to determine biological activity, including in a panel of multiple proteins for high-throughput screening; to raise antibodies or to elicit another immune response; as a reagent (including the labeled reagent) in assays designed to quantitatively determine levels of the protein (or its receptor) in biological fluids; as markers for tissues in which the corresponding polypeptide is preferentially expressed (either constitutively or at a particular stage of tissue differentiation or development or in a disease state); and, of course, to isolate correlative receptors or ligands. Proteins involved in these binding interactions can also be used to screen for peptide or small molecule inhibitors or agonists of the binding interaction.

[0167] Any or all of these research utilities are capable of being developed into reagent grade or kit format for commercialization as research products.

[0168] Methods for performing the uses listed above are well known to those skilled in the art. References disclosing such methods include without limitation “Molecular Cloning: A Laboratory Manual”, 2d ed., Cold Spring Harbor Laboratory Press, Sambrook, J., E. F. Fritsch and T. Maniatis eds., 1989, and “Methods in Enzymology: Guide to Molecular Cloning Techniques”, Academic Press, Berger, S. L. and A. R. Kimmeleds., 1987.

[0169] 4.10.2 Nutritional Uses

[0170] Polynucleotides and polypeptides of the present invention can also be used as nutritional sources or supplements. Such uses include without limitation use as a protein or amino acid supplement, use as a carbon source, use as a nitrogen source and use as a source of carbohydrate. In such cases the polypeptide or polynucleotide of the invention can be added to the feed of a particular organism or can be administered as a separate solid or liquid preparation, such as in the form of powder, pills, solutions, suspensions or capsules. In the case of microorganisms, the polypeptide or polynucleotide of the invention can be added to the medium in or on which the microorganism is cultured.

[0171] 4.10.3 Cytokine and Cell Proliferation/Differentiation Activity

[0172] A polypeptide of the present invention may exhibit activity relating to cytokine, cell proliferation (either inducing or inhibiting) or cell differentiation (either inducing or inhibiting) activity or may induce production of other cytokines in certain cell populations. A polynucleotide of the invention can encode a polypeptide exhibiting such attributes. Many protein factors discovered to date, including all known cytokines, have exhibited activity in one or more factor-dependent cell proliferation assays, and hence the assays serve as a convenient confirmation of cytokine activity. The activity of therapeutic compositions of the present invention is evidenced by any one of a number of routine factor dependent cell proliferation assays for cell lines including, without limitation, 32D, DA2, DA1G, T10, B9, B9/11, BaF3, MC9/G, M+(preB M+), 2E8, RB5, DAI, 123, T1165, HT2, CTLL2, TF-1, Mo7e, CMK, HUVEC, and Caco. Therapeutic compositions of the invention can be used in the following:

[0173] Assays for T-cell or thymocyte proliferation include without limitation those described in: Current Protocols in Immunology, Ed by J. E. Coligan, A. M. Kruisbeek, D. H. Margulies, E. M. Shevach, W. Strober, Pub. Greene Publishing Associates and Wiley-Interscience (Chapter 3, In Vitro assays for Mouse Lymphocyte Function 3.1-3.19; Chapter 7, Immunologic studies in Humans); Takai et al., J. Immunol. 137:3494-3500, 1986; Bertagnolli et al., J. Immunol. 145:1706-1712, 1990; Bertagnolli et al., Cellular Immunology 133:327-341, 1991; Bertagnolli, et al., I. Immunol. 149:3778-3783, 1992; Bowman et al., I. Immunol. 152:1756-1761, 1994.

[0174] Assays for cytokine production and/or proliferation of spleen cells, lymph node cells or thymocytes include, without limitation, those described in: Polyclonal T cell stimulation, Kruisbeek, A. M. and Shevach, E. M. In Current Protocols in Immunology. J. E. e.a. Coligan edsi Vol 1 pp. 3.12.1-3.12.14, John Wiley and Sons, Toronto. 1994; and Measurement of mouse and human interleukin-γ, Schreiber, R. D. In Current Protocols in Immunology. J. E. e.a. Coligan eds. Vol 1 pp. 6.8.1-6.8.8, John Wiley and Sons, Toronto. 1994.

[0175] Assays for proliferation and differentiation of hematopoietic and lymphopoietic cells include, without limitation, those described in: Measurement of Human and Murine Interleukin 2 and Interleukin 4, Bottomly, K., Davis, L. S. and Lipsky, P. E. In Current Protocols in Immunology. J. E. e.a. Coligan eds. Vol 1 pp. 6.3.1-6.3.12, John Wiley and Sons, Toronto. 1991; deVries et al., J. Exp. Med. 173:1205-1211, 1991; Moreau et al., Nature 336:690-692, 1988; Greenberger et al., Proc. Natl. Acad. Sci. U.S.A. 80:2931-2938, 1983; Measurement of mouse and human interleukin 6—Nordan, R In Current Protocols in Immunology. J. E. Coligan eds. Vol 1 pp. 6.6.1-6.6.5, John Wiley and Sons, Toronto. 1991; Smith et al., Proc. Natl. Aced. Sci. U.S.A. 83:1857-1861, 1986; Measurement of human Interleukin 11—Bennett, F., Giannotti, J., Clark, S.C. and Turner, K. J. In Current Protocols in Immunology. J. E. Coligan eds. Vol 1 pp. 6.15.1 John Wiley and Sons, Toronto. 1991; Measurement of mouse and human Interleukin 9—Ciarletta, A., Giannotti, J., Clark, S.C. and Turner, K. J. In Current Protocols in Immunology. J. E. Coligan eds. Vol 1 pp. 6.13.1, John Wiley and Sons, Toronto. 1991.

[0176] Assays for T-cell clone responses to antigens (which will identify, among others, proteins that affect APC-T cell interactions as well as direct T-cell effects by measuring proliferation and cytokine production) include, without limitation, those described in: Current Protocols in Immunology, Ed by J. E. Coligan, A. M. Kruisbeek, D. H. Margulies, E. M. Shevach, W Strober, Pub. Greene Publishing Associates and Wiley-Interscience (Chapter 3, In Vitro assays for Mouse Lymphocyte Function; Chapter 6, Cytokines and their cellular receptors; Chapter 7, Immunologic studies in Humans); Weinberger et al., Proc. Natl. Acad. Sci. USA 77:6091-6095, 1980; Weinberger et al., Eur. J. Immun. 11:405-411, 1981; Takai et al., J. Immunol. 137:3494-3500, 1986; Takai et al., J. Immunol. 140:508-512, 1988.

[0177] 4.10.4 Stem Cell Growth Factor Activity

[0178] A polypeptide of the present invention may exhibit stem cell growth factor activity and be involved in the proliferation, differentiation and survival of pluripotent and totipotent stem cells including primordial germ cells, embryonic stem cells, hematopoietic stem cells and/or germ line stem cells. Administration of the polypeptide of the invention to stem cells in vivo or ex vivo is expected to maintain and expand cell populations in a totipotential or pluripotential state which would be useful for re-engineering damaged or diseased tissues, transplantation, manufacture of bio-pharmaceuticals and the development of bio-sensors. The ability to produce large quantities of human cells has important working applications for the production of human proteins which currently must be obtained from non-human sources or donors, implantation of cells to treat diseases such as Parkinson's, Alzheimer's and other neurodegenerative diseases; tissues for grafting such as bone marrow, skin, cartilage, tendons, bone, muscle (including cardiac muscle), blood vessels, cornea, neural cells, gastrointestinal cells and others; and organs for transplantation such as kidney, liver, pancreas (including islet cells), heart and lung.

[0179] It is contemplated that multiple different exogenous growth factors and/or cytokines may be administered in combination with the polypeptide of the invention to achieve the desired effect, including any of the growth factors listed herein, other stem cell maintenance factors, and specifically including stem cell factor (SCF), leukemia inhibitory factor (LIF), Flt-3 ligand (Flt-3L), any of the interleukins, recombinant soluble L-6 receptor fused to IL-6, macrophage inflammatory protein I-alpha-1-alpha), G-CSF, GM-CSF, thrombopoietin (TPO), platelet factor 4 (PF-4), platelet-derived growth factor (PDGF), neural growth factors and basic fibroblast growth factor (bFGF).

[0180] Since totipotent stem cells can give rise to virtually any mature cell type, expansion of these cells in culture will facilitate the production of large quantities of mature cells. Techniques for culturing stem cells are known in the art and administration of polypeptides of the invention, optionally with other growth factors and/or cytokines, is expected to enhance the survival and proliferation of the stem cell populations. This can be accomplished by direct administration of the polypeptide of the invention to the culture medium. Alternatively, stroma cells transfected with a polynucleotide that encodes for the polypeptide of the invention can be used as a feeder layer for the stem cell populations in culture or in vivo. Stromal support cells for feeder layers may include embryonic bone marrow fibroblasts, bone marrow stromal cells, fetal liver cells, or cultured embryonic fibroblasts (see U.S. Pat. No. 5,690,926).

[0181] Stem cells themselves can be transfected with a polynucleotide of the invention to induce autocrine expression of the polypeptide of the invention. This will allow for generation of undifferentiated totipotential/pluripotential stem cell lines that are useful as is or that can then be differentiated into the desired mature cell types. These stable cell lines can also serve as a source of undifferentiated totipotential/pluripotential mRNA to create cDNA libraries and templates for polymerase chain reaction experiments. These studies would allow for the isolation and identification of differentially expressed genes in stem cell populations that regulate stem cell proliferation and/or maintenance.

[0182] Expansion and maintenance of totipotent stem cell populations will be useful in the treatment of many pathological conditions. For example, polypeptides of the present invention may be used to manipulate stem cells in culture to give rise to neuroepithelial cells that can be used to augment or replace cells damaged by illness, autoimmune disease, accidental damage or genetic disorders. The polypeptide of the invention may be useful for inducing the proliferation of neural cells and for the regeneration of nerve and brain tissue, i.e. for the treatment of central and peripheral nervous system diseases and neuropathies, as well as mechanical and traumatic disorders which involve degeneration, death or trauma to neural cells or nerve tissue. In addition, the expanded stem cell populations can also be genetically altered for gene therapy purposes and to decrease host rejection of replacement tissues after grafting or implantation.

[0183] Expression of the polypeptide of the invention and its effect on stem cells can also be manipulated to achieve controlled differentiation of the stem cells into more differentiated cell types. A broadly applicable method of obtaining pure populations of a specific differentiated cell type from undifferentiated stem cell populations involves the use of a cell-type specific promoter driving a selectable marker. The selectable marker allows only cells of the desired type to survive. For example, stem cells can be induced to differentiate into cardiomyocytes (Wobus et al., Differentiation, 48: 173-182, (1991); Klug et al., J. Clin. Invest., 98(1): 21-6-224, (1998)) or skeletal muscle cells (Browder, L. W. In: Principles of Tissue Engineering eds. Lanza et al., Academic Press (1997)). Alternatively, directed differentiation of stem cells can be accomplished by culturing the stem cells in the presence of a differentiation factor such as retinoic acid and an antagonist of the polypeptide of the invention which would inhibit the effects of endogenous stem cell factor activity and allow differentiation to proceed.

[0184] In vitro cultures of stem cells can be used to determine if the polypeptide of the invention exhibits stem cell growth factor activity. Stem cells are isolated from any one of various cell sources (including hematopoietic stem cells and embryonic stem cells) and cultured on a feeder layer, as described by Thompson et al. Proc. Natl. Acad. Sci, U.S.A., 92: 7844-7848 (1995), in the presence of the polypeptide of the invention alone or in combination with other growth factors or cytokines. The ability of the polypeptide of the invention to induce stem cells proliferation is determined by colony formation on semi-solid support e.g. as described by Bernstein et al., Blood, 77: 2316-2321 (1991).

[0185] 4.10.5 Hematopoiesis Regulating Activity

[0186] A polypeptide of the present invention may be involved in regulation of hematopoiesis and, consequently, in the treatment of myeloid or lymphoid cell disorders. Even marginal biological activity in support of colony forming cells or of factor-dependent cell lines indicates involvement in regulating hematopoiesis, e.g. in supporting the growth and proliferation of erythroid progenitor cells alone or in combination with other cytokines, thereby indicating utility, for example, in treating various anemias or for use in conjunction with irradiation/chemotherapy to stimulate the production of erythroid precursors and/or erythroid cells; in supporting the growth and proliferation of myeloid cells such as granulocytes and monocytes/macrophages (i.e., traditional CSF activity) useful, for example, in conjunction with chemotherapy to prevent or treat consequent myelo-suppression; in supporting the growth and proliferation of megakaryocytes and consequently of platelets thereby allowing prevention or treatment of various platelet disorders such as thrombocytopenia, and generally for use in place of or complimentary to platelet transfusions; and/or in supporting the growth and proliferation of hematopoietic stem cells which are capable of maturing to any and all of the above-mentioned hematopoietic cells and therefore find therapeutic utility in various stem cell disorders (such as those usually treated with transplantation, including, without limitation, aplastic anemia and paroxysmal nocturnal hemoglobinuria), as well as in repopulating the stem cell compartment post irradiation/chemotherapy, either in-vivo or ex-vivo (i.e., in conjunction with bone marrow transplantation or with peripheral progenitor cell transplantation (homologous or heterologous)) as normal cells or genetically manipulated for gene therapy.

[0187] Therapeutic compositions of the invention can be used in the following:

[0188] Suitable assays for proliferation and differentiation of various hematopoietic lines are cited above.

[0189] Assays for embryonic stem cell differentiation (which will identify, among others, proteins that influence embryonic differentiation hematopoiesis) include, without limitation, those described in: Johansson et al. Cellular Biology 15:141-151, 1995; Keller et al., Molecular and Cellular Biology 13:473-486, 1993; McClanahan et al., Blood 81:2903-2915, 1993.

[0190] Assays for stem cell survival and differentiation (which will identify, among others, proteins that regulate lympho-hematopoiesis) include, without limitation, those described in: Methylcellulose colony forming assays, Freshney, M. G. In Culture of Hematopoietic Cells. R I. Freshney, et al. eds. Vol pp. 265-268, Wiley-Liss, Inc., New York, N.Y. 1994; Hirayama et al., Proc. Natl. Acad. Sci. USA 89:5907-5911, 1992; Primitive hematopoietic colony forming cells with high proliferative potential, McNiece, I. K. and Briddell, R. A. In Culture of Hematopoietic Cells. R. I. Freshney, et al. eds. Vol pp. 23-39, Wiley-Liss, Inc., New York, N.Y. 1994; Neben et al., Experimental Hematology 22:353-359, 1994; Cobblestone area forming cell assay, Ploemacher, R. E. In Culture of Hematopoietic Cells. R. I. Freshney, et al. eds. Vol pp. 1-21, Wiley-Liss, Inc., New York, N.Y. 1994; Long term bone marrow cultures in the presence of stromal cells, Spooncer, E., Dexter, M. and Allen, T. In Culture of Hematopoietic Celts. R. I. Freshney, et al. eds. Vol pp. 163-179, Wiley-Liss, Inc., New York, N.Y. 1994; Long term culture initiating cell assay, Sutherland, H. J. In Culture of Hematopoietic Cells. R. I. Freshney, et al. eds. Vol pp. 139-162, Wiley-Liss, Inc., New York, N.Y. 1994.

[0191] 4.10.6 Tissue Growth Activity

[0192] A polypeptide of the present invention also may be involved in bone, cartilage, tendon, ligament and/or nerve tissue growth or regeneration, as well as in wound healing and tissue repair and replacement, and in healing of burns, incisions and ulcers.

[0193] A polypeptide of the present invention which induces cartilage and/or bone growth in circumstances where bone is not normally formed, has application in the healing of bone fractures and cartilage damage or defects in humans and other animals. Compositions of a polypeptide, antibody, binding partner, or other modulator of the invention may have prophylactic use in closed as well as open fracture reduction and also in the improved fixation of artificial joints. De novo bone formation induced by an osteogenic agent contributes to the repair of congenital, trauma induced, or oncologic resection induced craniofacial defects, and also is useful in cosmetic plastic surgery.

[0194] A polypeptide of this invention may also be involved in attracting bone-forming cells, stimulating growth of bone-forming cells, or inducing differentiation of progenitors of bone-forming cells. Treatment of osteoporosis, osteoarthritis, bone degenerative disorders, or periodontal disease, such as through stimulation of bone and/or cartilage repair or by blocking inflammation or processes of tissue destruction (collagenase activity, osteoclast activity, etc.) mediated by inflammatory processes may also be possible using the composition of the invention.

[0195] Another category of tissue regeneration activity that may involve the polypeptide of the present invention is tendon/ligament formation. Induction of tendon/ligament-like tissue or other tissue formation in circumstances where such tissue is not normally formed, has application in the healing of tendon or ligament tears, deformities and other tendon or ligament defects in humans and other animals. Such a preparation employing a tendon/ligament-like tissue inducing protein may have prophylactic use in preventing damage to tendon or ligament tissue, as well as use in the improved fixation of tendon or ligament to bone or other tissues, and in repairing defects to tendon or ligament tissue. De novo tendon/ligament-like tissue formation induced by a composition of the present invention contributes to the repair of congenital, trauma induced, or other tendon or ligament defects of other origin, and is also useful in cosmetic plastic surgery for attachment or repair of tendons or ligaments. The compositions of the present invention may provide environment to attract tendon- or ligament-forming cells, stimulate growth of tendon- or ligament-forming cells, induce differentiation of progenitors of tendon- or ligament-forming cells, or induce growth of tendon/ligament cells or progenitors ex vivo for return in vivo to effect tissue repair. The compositions of the invention may also be useful in the treatment of tendinitis, carpal tunnel syndrome and other tendon or ligament defects. The compositions may also include an appropriate matrix and/or sequestering agent as a carrier as is well known in the art.

[0196] The compositions of the present invention may also be useful for proliferation of neural cells and for regeneration of nerve and brain tissue, i.e. for the treatment of central and peripheral nervous system diseases and neuropathies, as well as mechanical and traumatic disorders, which involve degeneration, death or trauma to neural cells or nerve tissue. More specifically, a composition may be used in the treatment of diseases of the peripheral nervous system, such as peripheral nerve injuries, peripheral neuropathy and localized neuropathies, and central nervous system diseases, such as Alzheimer's, Parkinson's disease, Huntington's disease, amyotrophic lateral sclerosis, and Shy-Drager syndrome. Further conditions which may be treated in accordance with the present invention include mechanical and traumatic disorders, such as spinal cord disorders, head trauma and cerebrovascular diseases such as stroke. Peripheral neuropathies resulting from chemotherapy or other medical therapies may also be treatable using a composition of the invention.

[0197] Compositions of the invention may also be useful to promote better or faster closure of non-healing wounds, including without limitation pressure ulcers, ulcers associated with vascular insufficiency, surgical and traumatic wounds, and the like.

[0198] Compositions of the present invention may also be involved in the generation or regeneration of other tissues, such as organs (including, for example, pancreas, liver, intestine, kidney, skin, endothelium), muscle (smooth, skeletal or cardiac) and vascular (including vascular endothelium) tissue, or for promoting the growth of cells comprising such tissues. Part of the desired effects may be by inhibition or modulation of fibrotic scarring may allow normal tissue to regenerate. A polypeptide of the present invention may also exhibit angiogenic activity.

[0199] A composition of the present invention may also be useful for gut protection or regeneration and treatment of lung or liver fibrosis, reperfusion injury in various tissues, and conditions resulting from systemic cytokine damage.

[0200] A composition of the present invention may also be useful for promoting or inhibiting differentiation of tissues described above from precursor tissues or cells; or for inhibiting the growth of tissues described above.

[0201] Therapeutic compositions of the invention can be used in the following:

[0202] Assays for tissue generation activity include, without limitation, those described in. International Patent Publication No. WO95/16035 (bone, cartilage, tendon); International Patent Publication No. WO95/05846 (nerve, neuronal); International Patent Publication No. WO91/07491 (skin, endothelium).

[0203] Assays for wound healing activity include, without limitation, those described in: Winter, Epidermal Wound Healing, pps. 71-112 (Maibach, H. I. and Rovee, D. T., eds.), Year Book Medical Publishers, Inc., Chicago, as modified by Eaglstein and Mertz, J. Invest. Dermatol 71:382-84 (1978).

[0204] 4.10.7 Immune Stimulating or Suppressing Activity

[0205] A polypeptide of the present invention may also exhibit immune stimulating or immune suppressing activity, including without limitation the activities for which assays are described herein. A polynucleotide of the invention can encode a polypeptide exhibiting such activities. A protein may be useful in the treatment of various immune deficiencies and disorders (including severe combined immunodeficiency (SCID)), e.g., in regulating (up or down) growth and proliferation of T and/or B lymphocytes, as well as effecting the cytolytic activity of NK cells and other cell populations. These immune deficiencies may be genetic or be caused by viral (e.g., HIV) as well as bacterial or fungal infections, or may result from autoimmune disorders. More specifically, infectious diseases causes by viral, bacterial, fungal or other infection may be treatable using a protein of the present invention, including infections by HIV, hepatitis viruses, herpes viruses, mycobacteria, Leishmania spp., malaria spp. and various fungal infections such as candidiasis. Of course, in this regard, proteins of the present invention may also be useful where a boost to the immune system generally may be desirable, i.e., in the treatment of cancer.

[0206] Autoimmune disorders which may be treated using a protein of the present invention include, for example, connective tissue disease, multiple sclerosis, systemic lupus erythematosus, rheumatoid arthritis, autoimmune pulmonary inflammation, Guillain-Barre syndrome, autoimmune thyroiditis, insulin dependent diabetes mellitis, myasthenia gravis, graft-versus-host disease and autoimmune inflammatory eye disease. Such a protein (or antagonists thereof including antibodies) of the present invention may also to be useful in the treatment of allergic reactions and conditions (e.g., anaphylaxis, serum sickness, drug reactions, food allergies, insect venom allergies, mastocytosis, allergic rhinitis, hypersensitivity pneumonitis, urticaria, angioedema, eczema, atopic dermatitis, allergic contact dermatitis, erythema multiforme, Stevens-Johnson syndrome, allergic conjunctivitis, atopic keratoconjunctivitis, venereal keratoconjunctivitis, giant papillary conjunctivitis and contact allergies), such as asthma (particularly allergic asthma) or other respiratory problems. Other conditions, in which immune suppression is desired (including, for example, organ transplantation), may also be treatable using a protein (or antagonists thereof) of the present invention. The therapeutic effects of the polypeptides or antagonists thereof on allergic reactions can be evaluated by in vivo animals models such as the cumulative contact enhancement test (Lastbom et al., Toxicology 125: 59-66, 1998), skin prick test (Hoffmann et al., Allergy 54: 446-54, 1999), guinea pig skin sensitization test (Vohr et al., Arch. Toxocol. 73: 501-9), and murine local lymph node assay (Kimber et al., J. Toxicol. Environ. Health 53: 563-79).

[0207] Using the proteins of the invention it may also be possible to modulate immune responses, in a number of ways. Down regulation may be in the form of inhibiting or blocking an immune response already in progress or may involve preventing the induction of an immune response. The functions of activated T cells may be inhibited by suppressing T cell responses or by inducing specific tolerance in T cells, or both. Immunosuppression of T cell responses is generally an active, non-antigen-specific, process which requires continuous exposure of the T cells to the suppressive agent. Tolerance, which involves inducing non-responsiveness or anergy in T cells, is distinguishable from immunosuppression in that it is generally antigen-specific and persists after exposure to the tolerizing agent has ceased. Operationally, tolerance can be demonstrated by the lack of a T cell response upon reexposure to specific antigen in the absence of the tolerizing agent.

[0208] Down regulating or preventing one or more antigen functions (including without limitation B lymphocyte antigen functions (such as, for example, B7)), e.g., preventing high level lymphokine synthesis by activated T cells, will be useful in situations of tissue, skin and organ transplantation and in graft-versus-host disease (GVHD). For example, blockage of T cell function should result in reduced tissue destruction in tissue transplantation. Typically, in tissue transplants, rejection of the transplant is initiated through its recognition as foreign by T cells, followed by an immune reaction that destroys the transplant. The administration of a therapeutic composition of the invention may prevent cytokine synthesis by immune cells, such as T cells, and thus acts as an immunosuppressant. Moreover, a lack of costimulation may also be sufficient to anergize the T cells, thereby inducing tolerance in a subject. Induction of long-term tolerance by B lymphocyte antigen-blocking reagents may avoid the necessity of repeated administration of these blocking reagents. To achieve sufficient immunosuppression or tolerance in a subject, it may also be necessary to block the function of a combination of B lymphocyte antigens.

[0209] The efficacy of particular therapeutic compositions in preventing organ transplant rejection or GVHD can be assessed using animal models that are predictive of efficacy in humans. Examples of appropriate systems which can be used include allogeneic cardiac grafts in rats and xenogeneic pancreatic islet cell grafts in mice, both of which have been used to examine the immunosuppressive effects of CTLA41 g fusion proteins in vivo as described in Lenschow et al., Science 257:789-792 (1992) and Turka et al., Proc. Natl. Acad. Sci USA, 89:11102-11105 (1992). In addition, murine models of GVHD (see Paul ed., Fundamental Immunology, Raven Press, New York, 1989, pp. 846-847) can be used to determine the effect of therapeutic compositions of the invention on the development of that disease.

[0210] Blocking antigen function may also be therapeutically useful for treating autoimmune diseases. Many autoimmune disorders are the result of inappropriate activation of T cells that are reactive against self-tissue and which promote the production of cytokines and autoantibodies involved in the pathology of the diseases. Preventing the activation of autoreactive T cells may reduce or eliminate disease symptoms. Administration of reagents which block stimulation of T cells can be used to inhibit T cell activation and prevent production of autoantibodies or T cell-derived cytokines which may be involved in the disease process. Additionally, blocking reagents may induce antigen-specific tolerance of autoreactive T cells which could lead to long-term relief from the disease. The efficacy of blocking reagents in preventing or alleviating autoimmune disorders can be determined using a number of well-characterized animal models of human autoimmune diseases. Examples include murine experimental autoimmune encephalitis, systemic lupus erythmatosis in MRL/lpr/lpr mice or NZB hybrid mice, murine autoimmune collagen arthritis, diabetes mellitus in NOD mice and BB rats, and murine experimental myasthenia gravis (see Paul ed., Fundamental Immunology, Raven Press, New York, 1989, pp. 840-856).

[0211] Upregulation of an antigen function (e.g., a B lymphocyte antigen function), as a means of up regulating immune responses, may also be useful in therapy. Upregulation of immune responses may be in the form of enhancing an existing immune response or eliciting an initial immune response. For example, enhancing an immune response may be useful in cases of viral infection, including systemic viral diseases such as influenza, the common cold, and encephalitis.

[0212] Alternatively, anti-viral immune responses may be enhanced in an infected patient by removing T cells from the patient, costimulating the T cells in vitro with viral antigen-pulsed APCs either expressing a peptide of the present invention or together with a stimulatory form of a soluble peptide of the present invention and reintroducing the in vitro activated T cells into the patient. Another method of enhancing anti-viral immune responses would be to isolate infected cells from a patient, transfect them with a nucleic acid encoding a protein of the present invention as described herein such that the cells express all or a portion of the protein on their surface, and reintroduce the transfected cells into the patient. The infected cells would now be capable of delivering a costimulatory signal to, and thereby activate, T cells in vivo.

[0213] A polypeptide of the present invention may provide the necessary stimulation signal to T cells to induce a T cell mediated immune response against the transfected tumor cells. In addition, tumor cells which lack MHC class I or MHC class II molecules, or which fail to reexpress sufficient mounts of MHC class I or MHC class II molecules, can be transfected with nucleic acid encoding all or a portion of (e.g., a cytoplasmic-domain truncated portion) of an MHC class I alpha chain protein and P2 microglobulin protein or an MHC class II alpha chain protein and an MHC class II beta chain protein to thereby express MHC class I or MHC class II proteins on the cell surface. Expression of the appropriate class I or class II MHC in conjunction with a peptide having the activity of a B lymphocyte antigen (e.g., B7-1, B7-2, B7-3) induces a T cell mediated immune response against the transfected tumor cell. Optionally, a gene encoding an antisense construct which blocks expression of an MHC class II associated protein, such as the invariant chain, can also be cotransfected with a DNA encoding a peptide having the activity of a B lymphocyte antigen to promote presentation of tumor associated antigens and induce tumor specific immunity. Thus, the induction of a T cell mediated immune response in a human subject may be sufficient to overcome tumor-specific tolerance in the subject.

[0214] The activity of a protein of the invention may, among other means, be measured by the following methods:

[0215] Suitable assays for thymocyte or splenocyte cytotoxicity include, without limitation, those described in: Current Protocols in Immunology, Ed by J. E. Coligan, A. M. Kruisbeek, D. H. Margulies, E. M. Shevach, W. Strober, Pub. Greene Publishing Associates and Wiley-Interscience (Chapter 3, In Vitro assays for Mouse Lymphocyte Function 3.1-3.19; Chapter 7, Immunologic studies in Humans); Herrmann et al., Proc. Natl. Acad. Sci. USA 78:2488-2492, 1981; Herrmann et al., J. Immunol. 128:1968-1974, 1982; Handa et al., J. Immunol. 135:1564-1572, 1985; Takai et al., 1. Immunol. 137:3494-3500, 1986; Takai et al., J. Immunol. 140:508-512, 1988; Bowman et al., J. Virology 61:1992-1998; Bertagnolli et al., Cellular Immunology 133:327-341, 1991; Brown et al., J. Immunol. 153:3079-3092, 1994.

[0216] Assays for T-cell-dependent immunoglobulin responses and isotype switching (which will identify, among others, proteins that modulate T-cell dependent antibody responses and that affect Th1/Th2 profiles) include, without limitation, those described in: Maliszewski, J. Immunol. 144:3028-3033, 1990; and Assays for B cell function: In vitro antibody production, Mond, J. J. and Brunswick, M. In Current Protocols in Immunology. J. E. e.a. Coligan eds. Vol 1 pp. 3.8.1-3.8.16, John Wiley and Sons, Toronto. 1994.

[0217] Mixed lymphocyte reaction (MLR) assays (which will identify, among others, proteins that generate predominantly Th1 and CTL responses) include, without limitation, those described in: Current Protocols in Immunology, Ed by J. E. Coligan, A. M. Kruisbeek, D. H. Margulies, E. M. Shevach, W. Strober, Pub. Greene Publishing Associates and Wiley-Interscience (Chapter 3, In Vitro assays for Mouse Lymphocyte Function 3.1-3.19; Chapter 7, Immunologic studies in Humans); Takai et al., J. Immunol. 137:3494-3500, 1986; Takai et al., J. Immunol. 140:508-512, 1988; Bertagnolli et al., J. Immunol. 149:3778-3783, 1992.

[0218] Dendritic cell-dependent assays (which will identify, among others, proteins expressed by dendritic cells that activate naive T-cells) include, without limitation, those described in: Guery et al., J. Immunol. 134:536-544, 1995; Inaba et al., Journal of Experimental Medicine 173:549-559, 1991; Macatonia et al., Journal of Immunology 154:5071-5079, 1995; Porgador et al., Journal of Experimental Medicine 182:255-260, 1995; Nair et al., Journal of Virology 67:4062-4069, 1993; Huang et al., Science 264:961-965, 1994; Macatonia et al., Journal of Experimental Medicine 169:1255-1264, 1989; Bhardwaj et al., Journal of Clinical Investigation 94:797-807, 1994; and Inaba et al., Journal of Experimental Medicine 172:631-640, 1990.

[0219] Assays for lymphocyte survival/apoptosis (which will identify, among others, proteins that prevent apoptosis after superantigen induction and proteins that regulate lymphocyte homeostasis) include, without limitation, those described in: Darzynkiewicz et al., Cytometry 13:795-808, 1992; Gorczyca et al., Leukemia 7:659-670, 1993;

[0220] Gorczyca et al., Cancer Research 53:1945-1951, 1993; Itoh et al., Cell 66:233-243, 1991; Zacharchuk, Journal of Immunology 145:4037-4045, 1990; Zamai et al., Cytometry 14:891-897, 1993; Gorczyca et al., International Journal of Oncology 1:639-648, 1992.

[0221] Assays for proteins that influence early steps of T-cell commitment and development include, without limitation, those described in: Antica et al., Blood 84:111-117, 1994; Fine et al., Cellular Immunology 155:111-122, 1994; Galy et al., Blood 85:2770-2778, 1995; Toki et al., Proc. Nat. Acad. Sci. USA 88:7548-7551, 1991.

[0222] 4.10.8 Activin/Inhibin Activity

[0223] A polypeptide of the present invention may also exhibit activin- or inhibin-related activities. A polynucleotide of the invention may encode a polypeptide exhibiting such characteristics. Inhibins are characterized by their ability to inhibit the release of follicle stimulating hormone (FSH), while activins and are characterized by their ability to stimulate the release of follicle stimulating hormone (FSH). Thus, a polypeptide of the present invention, alone or in heterodimers with a member of the inhibin family, may be useful as a contraceptive based on the ability of inhibins to decrease fertility in female mammals and decrease spermatogenesis in male mammals. Administration of sufficient amounts of other inhibins can induce infertility in these mammals. Alternatively, the polypeptide of the invention, as a homodimer or as a heterodimer with other protein subunits of the inhibin group, may be useful as a fertility inducing therapeutic, based upon the ability of activin molecules in stimulating FSH release from cells of the anterior pituitary. See, for example, U.S. Pat. No. 4,798,885. A polypeptide of the invention may also be useful for advancement of the onset of fertility in sexually immature mammals, so as to increase the lifetime reproductive performance of domestic animals such as, but not limited to, cows, sheep and pigs.

[0224] The activity of a polypeptide of the invention may, among other means, be measured by the following methods.

[0225] Assays for activin/inhibin activity include, without limitation, those described in: Vale et al., Endocrinology 91:562-572, 1972; Ling et al., Nature 321:779-782, 1986; Vale et al., Nature 321:776-779, 1986; Mason et al., Nature 318:659-663, 1985; Forage et al., Proc. Natl. Acad. Sci. USA 83:3091-3095, 1986.

[0226] 4.10.9 Chemotactic/Chemokinetic Activity

[0227] A polypeptide of the present invention may be involved in chemotactic or chemokinetic activity for mammalian cells, including, for example, monocytes, fibroblasts, neutrophils, T-cells, mast cells, eosinophils, epithelial and/or endothelial cells. A polynucleotide of the invention can encode a polypeptide exhibiting such attributes. Chemotactic and chemokinetic receptor activation can be used to mobilize or attract a desired cell population to a desired site of action. Chemotactic or chemokinetic compositions (e.g. proteins, antibodies, binding partners, or modulators of the invention) provide particular advantages in treatment of wounds and other trauma to tissues, as well as in treatment of localized infections. For example, attraction of lymphocytes, monocytes or neutrophils to tumors or sites of infection may result in improved immune responses against the tumor or infecting agent.

[0228] A protein or peptide has chemotactic activity for a particular cell population if it can stimulate, directly or indirectly, the directed orientation or movement of such cell population. Preferably, the protein or peptide has the ability to directly stimulate directed movement of cells. Whether a particular protein has chemotactic activity for a population of cells can be readily determined by employing such protein or peptide in any known assay for cell chemotaxis.

[0229] Therapeutic compositions of the invention can be used in the following:

[0230] Assays for chemotactic activity (which will identify proteins that induce or prevent chemotaxis) consist of assays that measure the ability of a protein to induce the migration of cells across a membrane as well as the ability of a protein to induce the adhesion of one cell population to another cell population. Suitable assays for movement and adhesion include, without limitation, those described in: Current Protocols in Immunology, Ed by J. E. Coligan, A. M. Kruisbeek, D. H. Marguiles, E. M. Shevach, W. Strober, Pub. Greene Publishing Associates and Wiley-Interscience (Chapter 6.12, Measurement of alpha and beta Chemokines 6.12.1-6.12.28; Taub et al. J. Clin. Invest. 95:1370-1376, 1995; Lind et al. APMIS 103:140-146, 1995; Muller et al Eur. J. Immunol. 25:1744-1748; Gruber et al. J. of Immunol. 152:5860-5867, 1994; Johnston et al. J. of Immunol. 153:1762-1768, 1994.

[0231] 4.10.10 Hemostatic and Thrombolytic Activity

[0232] A polypeptide of the invention may also be involved in hemostatis or thrombolysis or thrombosis. A polynucleotide of the invention can encode a polypeptide exhibiting such attributes. Compositions may be useful in treatment of various coagulation disorders (including hereditary disorders, such as hemophilias) or to enhance coagulation and other hemostatic events in treating wounds resulting from trauma, surgery or other causes. A composition of the invention may also be useful for dissolving or inhibiting formation of thromboses and for treatment and prevention of conditions resulting therefrom (such as, for example, infarction of cardiac and central nervous system vessels (e.g., stroke).

[0233] Therapeutic compositions of the invention can be used in the following:

[0234] Assay for hemostatic and thrombolytic activity include, without limitation, those described in: Linet et al., J. Clin. Pharmacol. 26:131-140, 1986; Burdick et al., Thrombosis Res. 45:413-419, 1987; Humphrey et al., Fibrinolysis 5:71-79 (1991); Schaub, Prostaglandins 35:467-474, 1988.

[0235] 4.10.11 Cancer Diagnosis and Therapy

[0236] Polypeptides of the invention may be involved in cancer cell generation, proliferation or metastasis. Detection of the presence or amount of polynucleotides or polypeptides of the invention may be useful for the diagnosis and/or prognosis of one or more types of cancer. For example, the presence or increased expression of a polynucleotide/polypeptide of the invention may indicate a hereditary risk of cancer, a precancerous condition, or an ongoing malignancy. Conversely, a defect in the gene or absence of the polypeptide may be associated with a cancer condition. Identification of single nucleotide polymorphisms associated with cancer or a predisposition to cancer may also be useful for diagnosis or prognosis.

[0237] Cancer treatments promote tumor regression by inhibiting tumor cell proliferation, inhibiting angiogenesis (growth of new blood vessels that is necessary to support tumor growth) and/or prohibiting metastasis by reducing tumor cell motility or invasiveness. Therapeutic compositions of the invention may be effective in adult and pediatric oncology including in solid phase tumors/malignancies, locally advanced tumors, human soft tissue sarcomas, metastatic cancer, including lymphatic metastases, blood cell malignancies including multiple myeloma, acute and chronic leukemias, and lymphomas, head and neck cancers including mouth cancer, larynx cancer and thyroid cancer, lung cancers including small cell carcinoma and non-small cell cancers, breast cancers including small cell carcinoma and ductal carcinoma, gastrointestinal cancers including esophageal cancer, stomach cancer, colon cancer, colorectal cancer and polyps associated with colorectal neoplasia, pancreatic cancers, liver cancer, urologic cancers including bladder cancer and prostate cancer, malignancies of the female genital tract including ovarian carcinoma, uterine (including endometrial) cancers, and solid tumor in the ovarian follicle, kidney cancers including renal cell carcinoma, brain cancers including intrinsic brain tumors, neuroblastoma, astrocytic brain tumors, gliomas, metastatic tumor cell invasion in the central nervous system, bone cancers including osteomas, skin cancers including malignant melanoma, tumor progression of human skin keratinocytes, squamous cell carcinoma, basal cell carcinoma, hemangiopericytoma and Karposi's sarcoma.

[0238] Polypeptides, polynucleotides, or modulators of polypeptides of the invention (including inhibitors and stimulators of the biological activity of the polypeptide of the invention) may be administered to treat cancer. Therapeutic compositions can be administered in therapeutically effective dosages alone or in combination with adjuvant cancer therapy such as surgery, chemotherapy, radiotherapy, thermotherapy, and laser therapy, and may provide a beneficial effect, e.g. reducing tumor size, slowing rate of tumor growth, inhibiting metastasis, or otherwise improving overall clinical condition, without necessarily eradicating the cancer.

[0239] The composition can also be administered in therapeutically effective amounts as a portion of an anti-cancer cocktail. An anti-cancer cocktail is a mixture of the polypeptide or modulator of the invention with one or more anti-cancer drugs in addition to a pharmaceutically acceptable carrier for delivery. The use of anti-cancer cocktails as a cancer treatment is routine. Anti-cancer drugs that are well known in the art and can be used as a treatment in combination with the polypeptide or modulator of the invention include: Actinomycin D, Aminoglutethimide, Asparaginase, Bleomycin, Busulfan, Carboplatin, Carmustine, Chlorambucil, Cisplatin (cis-DDP), Cyclophosphamide, Cytarabine HCl (Cytosine arabinoside), Dacarbazine, Dactinomycin, Daunorubicin HCl,

[0240] Doxorubicin HCl, Estramustine phosphate sodium, Etoposide (VI 6-213), Floxuridine, 5-Fluorouracil (5-Fu), Flutamide, Hydroxyurea (hydroxycarbamide), Ifosfamide, Interferon Alpha-2a, Interferon Alpha-2b, Leuprolide acetate (LBRH-releasing factor analog), Lomustine, Mechlorethamine HCl (nitrogen mustard), Melphalan, Mercaptopurine, Mesna, Methotrexate (MTX), Mitomycin, Mitoxantrone HCl, Octreotide, Plicamycin, Procarbazine HCl, Streptozocin, Tamoxifen citrate, Thioguanine, Thiotepa, Vinblastine sulfate, Vincristine sulfate, Amsacrine, Azacitidine, Hexamethylmelamine, Interleukin-2, Mitoguazone, Pentostatin, Semustine, Teniposide, and Vindesine sulfate.

[0241] In addition, therapeutic compositions of the invention may be used for prophylactic treatment of cancer. There are hereditary conditions and/or environmental situations (e.g. exposure to carcinogens) known in the art that predispose an individual to developing cancers. Under these circumstances, it may be beneficial to treat these individuals with therapeutically effective doses of the polypeptide of the invention to reduce the risk of developing cancers.

[0242] In vitro models can be used to determine the effective doses of the polypeptide of the invention as a potential cancer treatment. These in vitro models include proliferation assays of cultured tumor cells, growth of cultured tumor cells in soft agar (see Freshney, (1987) Culture of Animal Cells: A Manual of Basic Technique, Wily-Liss, New York, N.Y. Ch 18 and Ch 21), tumor systems in nude mice as described in Giovanella et al., J. Natl. Can. Inst., 52: 921-30 (1974), mobility and invasive potential of tumor cells in Boyden Chamber assays as described in Pilkington et al., Anticancer Res., 17: 4107-9 (1997), and angiogenesis assays such as induction of vascularization of the chick chorioallantoic membrane or induction of vascular endothelial cell migration as described in Ribatta et al., Intl. J. Dev. Biol., 40: 1189-97 (1999) and Li et al., Clin. Exp. Metastasis, 17:423-9 (1999), respectively. Suitable tumor cells lines are available, e.g. from American Type Tissue Culture Collection catalogs.

[0243] 4.10.12 Receptor/Ligand Activity

[0244] A polypeptide of the present invention may also demonstrate activity as receptor, receptor ligand or inhibitor or agonist of receptor/ligand interactions. A polynucleotide of the invention can encode a polypeptide exhibiting such characteristics. Examples of such receptors and ligands include, without limitation, cytokine receptors and their ligands, receptor kinases and their ligands, receptor phosphatases and their ligands, receptors involved in cell-cell interactions and their ligands (including without limitation, cellular adhesion molecules (such as selectins, integrins and their ligands) and receptor/ligand pairs involved in antigen presentation, antigen recognition and development of cellular and humoral immune responses. Receptors and ligands are also useful for screening of potential peptide or small molecule inhibitors of the relevant receptor/ligand interaction. A protein of the present invention (including, without limitation, fragments of receptors and ligands) may themselves be useful as inhibitors of receptor/ligand interactions.

[0245] The activity of a polypeptide of the invention may, among other means, be measured by the following methods:

[0246] Suitable assays for receptor-ligand activity include without limitation those described in: Current Protocols in Immunology, Ed by J. E. Coligan, A. M. Kruisbeek, D. H. Margulies, E. M. Shevach, W. Strober, Pub. Greene Publishing Associates and Wiley-Interscience (Chapter 7.28, Measurement of Cellular Adhesion under static conditions 7.28.1-7.28.22), Takai et al., Proc. Natl. Acad. Sci. USA 84:6864-6868, 1987; Bierer et al., J. Exp. Med. 168:1145-1156, 1988; Rosenstein et al., J. Exp. Med. 169:149-160 1989; Stoltenborg et al., J. Immunol. Methods 175:59-68, 1994; Stitt et al., Cell 80:661-670, 1995.

[0247] By way of example, the polypeptides of the invention may be used as a receptor for a ligand(s) thereby transmitting the biological activity of that ligand(s). Ligands may be identified through binding assays, affinity chromatography, dihybrid screening assays, BIAcore assays, gel overlay assays, or other methods known in the art.

[0248] Studies characterizing drugs or proteins as agonist or antagonist or partial agonists or a partial antagonist require the use of other proteins as competing ligands. The polypeptides of the present invention or ligand(s) thereof may be labeled by being coupled to radioisotopes, colorimetric molecules or a toxin molecules by conventional methods. (“Guide to Protein Purification” Murray P. Deutscher (ed) Methods in Enzymology Vol. 182 (1990) Academic Press, Inc. San Diego). Examples of radioisotopes include, but are not limited to, tritium and carbon-14. Examples of calorimetric molecules include, but are not limited to, fluorescent molecules such as fluorescamine, or rhodamine or other colorimetric molecules. Examples of toxins include, but are not limited, to ricin.

[0249] 4.10.13 Drug Screening

[0250] This invention is particularly useful for screening chemical compounds by using the novel polypeptides or binding fragments thereof in any of a variety of drug screening techniques. The polypeptides or fragments employed in such a test may either be free in solution, affixed to a solid support, borne on a cell surface or located intracellularly. One method of drug screening utilizes eukaryotic or prokaryotic host cells which are stably transformed with recombinant nucleic acids expressing the polypeptide or a fragment thereof Drugs are screened against such transformed cells in competitive binding assays.

[0251] Such cells, either in viable or fixed form, can be used for standard binding assays. One may measure, for example, the formation of complexes between polypeptides of the invention or fragments and the agent being tested or examine the diminution in complex formation between the novel polypeptides and an appropriate cell line, which are well known in the art.

[0252] Sources for test compounds that may be screened for ability to bind to or modulate (i.e., increase or decrease) the activity of polypeptides of the invention include (1) inorganic and organic chemical libraries, (2) natural product libraries, and (3) combinatorial libraries comprised of either random or mimetic peptides, oligonucleotides or organic molecules.

[0253] Chemical libraries may be readily synthesized or purchased from a number of commercial sources, and may include structural analogs of known compounds or compounds that are identified as “hits” or “leads” via natural product screening.

[0254] The sources of natural product libraries are microorganisms (including bacteria and fungi), animals, plants or other vegetation, or marine organisms, and libraries of mixtures for screening may be created by: (1) fermentation and extraction of broths from soil, plant or marine microorganisms or (2) extraction of the organisms themselves. Natural product libraries include polyketides, non-ribosomal peptides, and (non-naturally occurring) variants thereof For a review, see Science 282:63-68 (1998).

[0255] Combinatorial libraries are composed of large numbers of peptides, oligonucleotides or organic compounds and can be readily prepared by traditional automated synthesis methods, PCR, cloning or proprietary synthetic methods. Of particular interest are peptide and oligonucleotide combinatorial libraries. Still other libraries of interest include peptide, protein, peptidomimetic, multiparallel synthetic collection, recombinatorial, and polypeptide libraries. For a review of combinatorial chemistry and libraries created therefrom, see Myers, Curr. Opin. Biotechnol. 8:701-707 (1997). For reviews and examples of peptidomimetic libraries, see Al-Obeidi et al., Mol. Biotechnol, 9(3):205-23 (1998); Hruby et al., Curr Opin Chem Biol, 1(1).114-19 (1997); Dormer et al., Bioorg Med Chem, 4(5):709-15 (1996) (alkylated dipeptides).

[0256] Identification of modulators through use of the various libraries described herein permits modification of the candidate “hit” (or “lead”) to optimize the capacity of the “hit” to bind a polypeptide of the invention. The molecules identified in the binding assay are then tested for antagonist or agonist activity in in vivo tissue culture or animal models that are well known in the art. In brief, the molecules are titrated into a plurality of cell cultures or animals and then tested for either cell/animal death or prolonged survival of the animal/cells.

[0257] The binding molecules thus identified may be complexed with toxins, e.g., ricin or cholera, or with other compounds that are toxic to cells such as radioisotopes. The toxin-binding molecule complex is then targeted to a tumor or other cell by the specificity of the binding molecule for a polypeptide of the invention. Alternatively, the binding molecules may be complexed with imaging agents for targeting and imaging purposes.

[0258] 4.10.14 Assay for Receptor Activity

[0259] The invention also provides methods to detect specific binding of a polypeptide e.g. a ligand or a receptor. The art provides numerous assays particularly useful for identifying previously unknown binding partners for receptor polypeptides of the invention. For example, expression cloning using mammalian or bacterial cells, or dihybrid screening assays can be used to identify polynucleotides encoding binding partners. As another example, affinity chromatography with the appropriate immobilized polypeptide of the invention can be used to isolate polypeptides that recognize and bind polypeptides of the invention. There are a number of different libraries used for the identification of compounds, and in particular small molecules, that modulate (i.e., increase or decrease) biological activity of a polypeptide of the invention Ligands for receptor polypeptides of the invention can also be identified by adding exogenous ligands, or cocktails of ligands to two cells populations that are genetically identical except for the expression of the receptor of the invention: one cell population expresses the receptor of the invention whereas the other does not. The responses of the two cell populations to the addition of ligands(s) are then compared. Alternatively, an expression library can be co-expressed with the polypeptide of the invention in cells and assayed for an autocrine response to identify potential ligand(s). As still another example, BIAcore assays, gel overlay assays, or other methods known in the art can be used to identify binding partner polypeptides, including, (1) organic and inorganic chemical libraries, (2) natural product libraries, and (3) combinatorial libraries comprised of random peptides, oligonucleotides or organic molecules.

[0260] The role of downstream intracellular signaling molecules in the signaling cascade of the polypeptide of the invention can be determined. For example, a chimeric protein in which the cytoplasmic domain of the polypeptide of the invention is fused to the extracellular portion of a protein, whose ligand has been identified, is produced in a host cell. The cell is then incubated with the ligand specific for the extracellular portion of the chimeric protein, thereby activating the chimeric receptor. Known downstream proteins involved in intracellular signaling can then be assayed for expected modifications i.e. phosphorylation. Other methods known to those in the art can also be used to identify signaling molecules involved in receptor activity.

[0261] 4.10.15 Anti-Inflammatory Activity

[0262] Compositions of the present invention may also exhibit anti-inflammatory activity. The anti-inflammatory activity may be achieved by providing a stimulus to cells involved in the inflammatory response, by inhibiting or promoting cell-cell interactions (such as, for example, cell adhesion), by inhibiting or promoting chemotaxis of cells involved in the inflammatory process, inhibiting or promoting cell extravasation, or by stimulating or suppressing production of other factors which more directly inhibit or promote an inflammatory response. Compositions with such activities can be used to treat inflammatory conditions including chronic or acute conditions), including without limitation intimation associated with infection (such as septic shock, sepsis or systemic inflammatory response syndrome (SIRS)), ischemia-reperfusion injury, endotoxin lethality, arthritis, complement-mediated hyperacute rejection, nephritis, cytokine or chemokine-induced lung injury, inflammatory bowel disease, Crohn's disease or resulting from over production of cytokines such as TNF or IL-1. Compositions of the invention may also be useful to treat anaphylaxis and hypersensitivity to an antigenic substance or material. Compositions of this invention may be utilized to prevent or treat conditions such as, but not limited to, sepsis, acute pancreatitis, endotoxin shock, cytokine induced shock, rheumatoid arthritis, chronic inflammatory arthritis, pancreatic cell damage from diabetes mellitus type 1, graft versus host disease, inflammatory bowel disease, inflamation associated with pulmonary disease, other autoimmune disease or inflammatory disease, an antiproliferative agent such as for acute or chronic mylegenous leukemia or in the prevention of premature labor secondary to intrauterine infections.

[0263] 4.10.16 Leukemias

[0264] Leukemias and related disorders may be treated or prevented by administration of a therapeutic that promotes or inhibits function of the polynucleotides and/or polypeptides of the invention. Such leukemias and related disorders include but are not limited to acute leukemia, acute lymphocytic leukemia, acute myelocytic leukemia, myeloblastic, promyelocytic, myelomonocytic, monocytic, erythroleukemia, chronic leukemia, chronic myelocytic (granulocytic) leukemia and chronic lymphocytic leukemia (for a review of such disorders, see Fishman et al., 1985, Medicine, 2d Ed., J. B. Lippincott Co., Philadelphia).

[0265] 4.10.17 Nervous System Disorders

[0266] Nervous system disorders, involving cell types which can be tested for efficacy of intervention with compounds that modulate the activity of the polynucleotides and/or polypeptides of the invention, and which can be treated upon thus observing an indication of therapeutic utility, include but are not limited to nervous system injuries, and diseases or disorders which result in either a disconnection of axons, a diminution or degeneration of neurons, or demyelinatiorl Nervous system lesions which may be treated in a patient (including human and non-human mammalian patients) according to the invention include but are not limited to the following lesions of either the central (including spinal cord, brain) or peripheral nervous systems:

[0267] (i) traumatic lesions, including lesions caused by physical injury or associated with surgery, for example, lesions which sever a portion of the nervous system, or compression injuries;

[0268] (ii) ischemic lesions, in which a lack of oxygen in a portion of the nervous system results in neuronal injury or death, including cerebral infarction or ischemia, or spinal cord infarction or ischemia;

[0269] (iii) infectious lesions, in which a portion of the nervous system is destroyed or injured as a result of infection, for example, by an abscess or associated with infection by human immunodeficiency virus, herpes zoster, or herpes simplex virus or with Lyme disease, tuberculosis, syphilis;

[0270] (iv) degenerative lesions, in which a portion of the nervous system is destroyed or injured as a result of a degenerative process including but not limited to degeneration associated with Parkinson's disease, Alzheimer's disease, Huntington's chorea, or amyotrophic lateral sclerosis;

[0271] (v) lesions associated with nutritional diseases or disorders, in which a portion of the nervous system is destroyed or injured by a nutritional disorder or disorder of metabolism including but not limited to, vitamin B 12 deficiency, folic acid deficiency, Wernicke disease, tobacco-alcohol amblyopia, Marchiafava-Bignami disease (primary degeneration of the corpus callosum), and alcoholic cerebellar degeneration,

[0272] (vi) neurological lesions associated with systemic diseases including but not limited to diabetes (diabetic neuropathy, Bell's palsy), systemic lupus erythematosus, carcinoma, or sarcoidosis;

[0273] (vii) lesions caused by toxic substances including alcohol, lead, or particular neurotoxins; and

[0274] (viii) demyelinated lesions in which a portion of the nervous system is destroyed or injured by a demyelinating disease including but not limited to multiple sclerosis, human immunodeficiency virus-associated myelopathy, transverse myelopathy or various etiologies, progressive multifocal leukoencephalopathy, and central pontine myelinolysis.

[0275] Therapeutics which are useful according to the invention for treatment of a nervous system disorder may be selected by testing for biological activity in promoting the survival or differentiation of neurons. For example, and not by way of limitation, therapeutics which elicit any of the following effects may be useful according to the invention:

[0276] (i) increased survival time of neurons in culture;

[0277] (ii) increased sprouting of neurons in culture or in vivo;

[0278] (iii) increased production of a neuron-associated molecule in culture or in vivo, e.g., choline acetyltransferase or acetylcholinesterase with respect to motor neurons; or

[0279] (iv) decreased symptoms of neuron dysfunction in vivo.

[0280] Such effects may be measured by any method known in the art. In preferred, non-limiting embodiments, increased survival of neurons may be measured by the method set forth in Arakawa et al. (1990, J. Neurosci. 10:3507-3515); increased sprouting of neurons may be detected by methods set forth in Pestronk et al. (1980, Exp. Neurol. 70:65-82) or Brown et al. (1981, Ann. Rev. Neurosci. 4:17-42); increased production of neuron-associated molecules may be measured by bioassay, enzymatic assay, antibody binding, Northern blot assay, etc., depending on the molecule to be measured; and motor neuron dysfunction may be measured by assessing the physical manifestation of motor neuron disorder, e.g., weakness, motor neuron conduction velocity, or functional disability.

[0281] In specific embodiments, motor neuron disorders that may be treated according to the invention include but are not limited to disorders such as infarction, infection, exposure to toxin, trauma, surgical damage, degenerative disease or malignancy that may affect motor neurons as well as other components of the nervous system, as well as disorders that selectively affect neurons such as amyotrophic lateral sclerosis, and including but not limited to progressive spinal muscular atrophy, progressive bulbar palsy, primary lateral sclerosis, infantile and juvenile muscular atrophy, progressive bulbar paralysis of childhood (Fazio-Londe syndrome), poliomyelitis and the post polio syndrome, and Hereditary Motorsensory Neuropathy (Charcot-Marie-Tooth Disease).

[0282] 4.10.18 Other Activities

[0283] A polypeptide of the invention may also exhibit one or more of the following additional activities or effects: inhibiting the growth, infection or function of, or killing, infectious agents, including, without limitation, bacteria, viruses, fungi and other parasites; effecting (suppressing or enhancing) bodily characteristics, including, without limitation, height, weight, hair color, eye color, skin, fat to lean ratio or other tissue pigmentation, or organ or body part size or shape (such as, for example, breast augmentation or diminution, change in bone form or shape); effecting biorhythms or circadian cycles or rhythms; effecting the fertility of male or female subjects; effecting the metabolism, catabolism, anabolism, processing, utilization, storage or elimination of dietary fat, lipid, protein, carbohydrate, vitamins, minerals, co-factors or other nutritional factors or component(s); effecting behavioral characteristics, including, without limitation, appetite, libido, stress, cognition (including cognitive disorders), depression (including depressive disorders) and violent behaviors; providing analgesic effects or other pain reducing effects; promoting differentiation and growth of embryonic stem cells in lineages other than hematopoietic lineages; hormonal or endocrine activity; in the case of enzymes, correcting deficiencies of the enzyme and treating deficiency-related diseases; treatment of hyperproliferative disorders (such as, for example, psoriasis); immunoglobulin-like activity (such as, for example, the ability to bind antigens or complement); and the ability to act as an antigen in a vaccine composition to raise an immune response against such protein or another material or entity which is cross-reactive with such protein.

[0284] 4.10.19 Identification of Polymorphisms

[0285] The demonstration of polymorphisms makes possible the identification of such polymorphisms in human subjects and the pharmacogenetic use of this information for diagnosis and treatment. Such polymorphisms may be associated with, e.g., differential predisposition or susceptibility to various disease states (such as disorders involving inflammation or immune response) or a differential response to drug administration, and this genetic information can be used to tailor preventive or therapeutic treatment appropriately. For example, the existence of a polymorphism associated with a predisposition to inflammation or autoimnune disease makes possible the diagnosis of this condition in humans by identifying the presence of the polymorphism.

[0286] Polymorphisms can be identified in a variety of ways known in the art which all generally involve obtaining a sample from a patient, analyzing DNA from the sample, optionally involving isolation or amplification of the DNA, and identifying the presence of the polymorphism in the DNA. For example, PCR may be used to amplify an appropriate fragment of genomic DNA which may then be sequenced. Alternatively, the DNA may be subjected to allele-specific oligonucleotide hybridization (in which appropriate oligonucleotides are hybridized to the DNA under conditions permitting detection of a single base mismatch) or to a single nucleotide extension assay (in which an oligonucleotide that hybridizes immediately adjacent to the position of the polymorphism is extended with one or more labeled nucleotides). In addition, traditional restriction fragment length polymorphism analysis (using restriction enzymes that provide differential digestion of the genomic DNA depending on the presence or absence of the polymorphism) may be performed. Arrays with nucleotide sequences of the present invention can be used to detect polymorphisms. The array can comprise modified nucleotide sequences of the present invention in order to detect the nucleotide sequences of the present invention, In the alternative, any one of the nucleotide sequences of the present invention can be placed on the array to detect changes from those sequences.

[0287] Alternatively a polymorphism resulting in a change in the amino acid sequence could also be detected by detecting a corresponding change in amino acid sequence of the protein, e.g., by an antibody specific to the variant sequence.

[0288] 4.10.20 Arthritis And Inflammation

[0289] The immunosuppressive effects of the compositions of the invention against rheumatoid arthritis is determined in an experimental animal model system. The experimental model system is adjuvant induced arthritis in rats, and the protocol is described by J. Holoshitz, et al., 1983, Science, 219:56, or by B. Waksman et al., 1963,

[0290] Int. Arch. Allergy Appl. Immunol., 23:129. Induction of the disease can be caused by a single injection, generally intradermally, of a suspension of killed Mycobacterium tuberculosis in complete Freund's adjuvant (CFA). The route of injection can vary, but rats may be injected at the base of the tail with an adjuvant mixture. The polypeptide is administered in phosphate buffered solution (PBS) at a dose of about 1-5 mg/kg. The control consists of administering PBS only.

[0291] The procedure for testing the effects of the test compound would consist of intradermally injecting killed Mycobacterium tuberculosis in CFA followed by immediately administering the test compound and subsequent treatment every other day until day 24. At 14, 15, 18, 20, 22, and 24 days after injection of Mycobacterium CFA, an overall arthritis score may be obtained as described by J. Holoskitz above, An analysis of the data would reveal that the test compound would have a dramatic affect on the swelling of the joints as measured by a decrease of the arthritis score.

[0292] 4.11 Therapeutic Methods

[0293] The compositions (including polypeptide fragments, analogs, variants and antibodies or other binding partners or modulators including antisense polynucleotides) of the invention have numerous applications in a variety of therapeutic methods. Examples of therapeutic applications include, but are not limited to, those exemplified herein.

[0294] 4.11.1 Example

[0295] One embodiment of the invention is the administration of an effective amount of the polypeptides or other composition of the invention to individuals affected by a disease or disorder that can be modulated by regulating the peptides of the invention.

[0296] While the mode of administration is not particularly important, parenteral administration is preferred. An exemplary mode of administration is to deliver an intravenous bolus.

[0297] The dosage of the polypeptides or other composition of the invention will normally be determined by the prescribing physician. It is to be expected that the dosage will vary according to the age, weight, condition and response of the individual patient. Typically, the amount of polypeptide administered per dose will be in the range of about 0.01 μg/kg to 100 mg/kg of body weight, with the preferred dose being about 0.1 μg/kg to 10 mg/kg of patient body weight. For parenteral administration, polypeptides of the invention will be formulated in an injectable form combined with a pharmaceutically acceptable parenteral vehicle. Such vehicles are well known in the art and examples include water, saline, Ringer's solution, dextrose solution, and solutions consisting of small amounts of the human serum albumin. The vehicle may contain minor amounts of additives that maintain the isotonicity and stability of the polypeptide or other active ingredient. The preparation of such solutions is within the skill of the art.

[0298] 4.12 Pharmaceutical Formulations and Routes of Administration

[0299] A protein or other composition of the present invention (from whatever source derived, including without limitation from recombinant and non-recombinant sources and including antibodies and other binding partners of the polypeptides of the invention) may be administered to a patient in need, by itself, or in pharmaceutical compositions where it is mixed with suitable carriers or excipient(s) at doses to treat or ameliorate a variety of disorders. Such a composition may optionally contain (in addition to protein or other active ingredient and a carrier) diluents, fillers, salts, buffers, stabilizers, solubilizers, and other materials well known in the art. The term “pharmaceutically acceptable” means a non-toxic material that does not interfere with the effectiveness of the biological activity of the active ingredient(s). The characteristics of the carrier will depend on the route of administration. The pharmaceutical composition of the invention may also contain cytokines, lymphokines, or other hematopoietic factors such as M-C SF, GM-C SF, TNF, IL-1, IL-2, IL-3, IL-4, IL-5, IL-6, IL-7, EL-8, IL-9, IL-10, IL-11, IL-12, IL-13, IL-14, IL-IS, IFN, TNF0, TNF1, TNF2, G-CSF, Meg-CSF, thrombopoietin, stem cell factor, and erythropoietin. In further compositions, proteins of the invention may be combined with other agents beneficial to the treatment of the disease or disorder in question. These agents include various growth factors such as epidermal growth factor (EGF), platelet-derived growth factor (PDGF), transforming growth factors (TGF-A and TGF-(3), insulin-like growth factor (IGF), as well as cytokines described herein.

[0300] The pharmaceutical composition may further contain other agents which either enhance the activity of the protein or other active ingredient or complement its activity or use in treatment. Such additional factors and/or agents may be included in the pharmaceutical composition to produce a synergistic effect with protein or other active ingredient of the invention, or to minimize side effects. Conversely, protein or other active ingredient of the present invention may be included in formulations of the particular clotting factor, cytokine, lymphokine, other hematopoietic factor, thrombolytic or anti-thrombotic factor, or anti-inflammatory agent to minimize side effects of the clotting factor, cytokine, lymphokine, other hematopoietic factor, thrombolytic or anti-thrombotic factor, or anti-inflammatory agent (such as IL-1Ra, IL-1 Hy 1, IL-1 Hy2, anti-TNF, corticosteroids, immunosuppressive agents). A protein of the present invention may be active in multimers (e.g., heterodimers or homodimers) or complexes with itself or other proteins. As a result, pharmaceutical compositions of the invention may comprise a protein of the invention in such multimeric or complexed form.

[0301] As an alternative to being included in a pharmaceutical composition of the invention including a first protein, a second protein or a therapeutic agent may be concurrently administered with the first protein (e.g., at the same time, or at differing times provided that therapeutic concentrations of the combination of agents is achieved at the treatment site). Techniques for formulation and administration of the compounds of the instant application may be found in “Remington's Pharmaceutical Sciences,” Mack Publishing Co., Easton, Pa., latest edition. A therapeutically effective dose further refers to that amount of the compound sufficient to result in amelioration of symptoms, e.g., treatment, healing, prevention or amelioration of the relevant medical condition, or an increase in rate of treatment, healing, prevention or amelioration of such conditions. When applied to an individual active ingredient, administered alone, a therapeutically effective dose refers to that ingredient alone. When applied to a combination, a therapeutically effective dose refers to combined amounts of the active ingredients that result in the therapeutic effect, whether administered in combination, serially or simultaneously.

[0302] In practicing the method of treatment or use of the present invention, a therapeutically effective amount of protein or other active ingredient of the present invention is administered to a mammal having a condition to be treated. Protein or other active ingredient of the present invention may be administered in accordance with the method of the invention either alone or in combination with other therapies such as treatments employing cytokines, lymphokines or other hematopoietic factors. When co-administered with one or more cytokines, lymphokines or other hematopoietic factors, protein or other active ingredient of the present invention may be administered either simultaneously with the cytokine(s), lymphokine(s), other hematopoietic factor(s), thrombolytic or anti-thrombotic factors, or sequentially. If administered sequentially, the attending physician will decide on the appropriate sequence of administering protein or other active ingredient of the present invention in combination with cytokine(s), lymphokine(s), other hematopoietic factor(s), thrombolytic or anti-thrombotic factors.

[0303] 4.12.1 Routes of Administration

[0304] Suitable routes of administration may, for example, include oral, rectal, transmucosal, or intestinal administration; parenteral delivery, including intramuscular, subcutaneous, intramedullary injections, as well as intrathecal, direct intraventricular, intravenous, intraperitoneal, intranasal, or intraocular injections. Administration of protein or other active ingredient of the present invention used in the pharmaceutical composition or to practice the method of the present invention can be carried out in a variety of conventional ways, such as oral ingestion, inhalation, topical application or cutaneous, subcutaneous, intraperitoneal, parenteral or intravenous injection. Intravenous administration to the patient is preferred.

[0305] Alternately, one may administer the compound in a local rather than systemic manner, for example, via injection of the compound directly into a arthritic joints or in fibrotic tissue, often in a depot or sustained release formulation. In order to prevent the scarring process frequently occurring as complication of glaucoma surgery, the compounds may be administered topically, for example, as eye drops. Furthermore, one may administer the drug in a targeted drug delivery system, for example, in a liposome coated with a specific antibody, targeting, for example, arthritic or fibrotic tissue. The liposomes will be targeted to and taken up selectively by the afflicted tissue.

[0306] The polypeptides of the invention are administered by any route that delivers an effective dosage to the desired site of action. The determination of a suitable route of administration and an effective dosage for a particular indication is within the level of skill in the art. Preferably for wound treatment, one administers the therapeutic compound directly to the site. Suitable dosage ranges for the polypeptides of the invention can be extrapolated from these dosages or from similar studies in appropriate animal models. Dosages can then be adjusted as necessary by the clinician to provide maximal therapeutic benefit.

[0307] 4.12.2 Compositions/Formulations

[0308] Pharmaceutical compositions for use in accordance with the present invention thus may be formulated in a conventional manner using one or more physiologically acceptable carriers comprising excipients and auxiliaries which facilitate processing of the active compounds into preparations which can be used pharmaceutically. These pharmaceutical compositions may be manufactured in a manner that is itself known, e.g., by means of conventional mixing, dissolving, granulating, dragee-making, levigating, emulsifying, encapsulating, entrapping or lyophilizing processes. Proper formulation is dependent upon the route of administration chosen. When a therapeutically effective amount of protein or other active ingredient of the present invention is administered orally, protein or other active ingredient of the present invention will be in the form of a tablet, capsule, powder, solution or elixir. When administered in tablet form, the pharmaceutical composition of the invention may additionally contain a solid carrier such as a gelatin or an adjuvant. The tablet, capsule, and powder contain from about 5 to 95% protein or other active ingredient of the present invention, and preferably from about 25 to 90% protein or other active ingredient of the present invention. When administered in liquid form, a liquid carrier such as water, petroleum, oils of animal or plant origin such as peanut oil, mineral oil, soybean oil, or sesame oil, or synthetic oils may be added. The liquid form of the pharmaceutical composition may further contain physiological saline solution, dextrose or other saccharide solution, or glycols such as ethylene glycol, propylene glycol or polyethylene glycol. When administered in liquid form, the pharmaceutical composition contains from about 0.5 to 90% by weight of protein or other active ingredient of the present invention, and preferably from about 1 to 50% protein or other active ingredient of the present invention.

[0309] When a therapeutically effective amount of protein or other active ingredient of the present invention is administered by intravenous, cutaneous or subcutaneous injection, protein or other active ingredient of the present invention will be in the form of a pyrogen-free, parenterally acceptable aqueous solution. The preparation of such parenterally acceptable protein or other active ingredient solutions, having due regard to pH, isotonicity, stability, and the like, is within the skill in the art. A preferred pharmaceutical composition for intravenous, cutaneous, or subcutaneous injection should contain, in addition to protein or other active ingredient of the present invention, an isotonic vehicle such as Sodium Chloride Injection, Ringer's Injection, Dextrose Injection, Dextrose and Sodium Chloride Injection, Lactated Ringer's Injection, or other vehicle as known in the art. The pharmaceutical composition of the present invention may also contain stabilizers, preservatives, buffers, antioxidants, or other additives known to those of skill in the art. For injection, the agents of the invention may be formulated in aqueous solutions, preferably in physiologically compatible buffers such as Hanks's solution, Ringer's solution, or physiological saline buffer. For transmucosal administration, penetrants appropriate to the barrier to be permeated are used in the formulation. Such penetrants are generally known in the art.

[0310] For oral administration, the compounds can be formulated readily by combining the active compounds with pharmaceutically acceptable carriers well known in the art. Such carriers enable the compounds of the invention to be formulated as tablets, pills, dragees, capsules, liquids, gels, syrups, slurries, suspensions and the like, for oral ingestion by a patient to be treated. Pharmaceutical preparations for oral use can be obtained from a solid excipient, optionally grinding a resulting mixture, and processing the mixture of granules, after adding suitable auxiliaries, if desired, to obtain tablets or dragee cores. Suitable excipients are, in particular, fillers such as sugars, including lactose, sucrose, mannitol, or sorbitol; cellulose preparations such as, for example, maize starch, wheat starch, rice starch, potato starch, gelatin, gum tragacanth, methyl cellulose, hydroxypropylmethyl-cellulose, sodium carboxymethylcellulose, and/or polyvinylpyrrolidone (PVP). If desired, disintegrating agents may be added, such as the cross-linked polyvinyl pyrrolidone, agar, or alginic acid or a salt thereof such as sodium alginate. Dragee cores are provided with suitable coatings. For this purpose, concentrated sugar solutions may be used, which may optionally contain gum arabic, talc, polyvinyl pyrrolidone, carbopol gel, polyethylene glycol, and/or titanium dioxide, lacquer solutions, and suitable organic solvents or solvent mixtures. Dyestuffs or pigments may be added to the tablets or dragee coatings for identification or to characterize different combinations of active compound doses.

[0311] Pharmaceutical preparations which can be used orally include push-fit capsules made of gelatin, as well as soft, sealed capsules made of gelatin and a plasticizer, such as glycerol or sorbitol. The push-fit capsules can contain the active ingredients in admixture with filler such as lactose, binders such as starches, and/or lubricants such as talc or magnesium stearate and, optionally, stabilizers. In soft capsules, the active compounds may be dissolved or suspended in suitable liquids, such as fatty oils, liquid paraffin, or liquid polyethylene glycols. In addition, stabilizers may be added. All formulations for oral administration should be in dosages suitable for such administration. For buccal administration, the compositions may take the form of tablets or lozenges formulated in conventional manner.

[0312] For administration by inhalation, the compounds for use according to the present invention are conveniently delivered in the form of an aerosol spray presentation from pressurized packs or a nebuliser, with the use of a suitable propellant, e.g., dichlorodifluoromethane, trichlorofluoromethane, dichlorotetrafluoroethane, carbon dioxide or other suitable gas. In the case of a pressurized aerosol the dosage unit may be determined by providing a valve to deliver a metered amount. Capsules and cartridges of, e.g., gelatin for use in an inhaler or insufflator may be formulated containing a powder mix of the compound and a suitable powder base such as lactose or starch. The compounds may be formulated for parenteral administration by injection, e.g., by bolus injection or continuous infusion. Formulations for injection may be presented in unit dosage form, e.g., in ampules or in multi-dose containers, with an added preservative. The compositions may take such forms as suspensions, solutions or emulsions in oily or aqueous vehicles, and may contain formulatory agents such as suspending, stabilizing and/or dispersing agents.

[0313] Pharmaceutical formulations for parenteral administration include aqueous solutions of the active compounds in water-soluble form. Additionally, suspensions of the active compounds may be prepared as appropriate oily injection suspensions. Suitable lipophilic solvents or vehicles include fatty oils such as sesame oil, or synthetic fatty acid esters, such as ethyl oleate or triglycerides, or liposomes. Aqueous injection suspensions may contain substances which increase the viscosity of the suspension, such as sodium carboxymethyl cellulose, sorbitol, or dextran. Optionally, the suspension may also contain suitable stabilizers or agents which increase the solubility of the compounds to allow for the preparation of highly concentrated solutions. Alternatively, the active ingredient may be in powder form for constitution with a suitable vehicle, e.g., sterile pyrogen-free water, before use.

[0314] The compounds may also be formulated in rectal compositions such as suppositories or retention enemas, e.g., containing conventional suppository bases such as cocoa butter or other glycerides. In addition to the formulations described previously, the compounds may also be formulated as a depot preparation. Such long acting formulations may be administered by implantation (for example subcutaneously or intramuscularly) or by intramuscular injection. Thus, for example, the compounds may be formulated with suitable polymeric or hydrophobic materials (for example as an emulsion in an acceptable oil) or ion exchange resins, or as sparingly soluble derivatives, for example, as a sparingly soluble salt.

[0315] A pharmaceutical carrier for the hydrophobic compounds of the invention is a co-solvent system comprising benzyl alcohol, a nonpolar surfactant, a water-miscible organic polymer, and an aqueous phase. The co-solvent system may be the VPD co-solvent system. VPD is a solution of 3% w/v benzyl alcohol, 8% w/v of the nonpolar surfactant polysorbate 80, and 65% w/v polyethylene glycol 300, made up to volume in absolute ethanol. The VPD co-solvent system (VPD:5W) consists of VPD diluted 1:1 with a 5% dextrose in water solution. This co-solvent system dissolves hydrophobic compounds well, and itself produces low toxicity upon systemic administration. Naturally, the proportions of a co-solvent system may be varied considerably without destroying its solubility and toxicity characteristics. Furthermore, the identity of the co-solvent components may be varied: for example, other low-toxicity nonpolar surfactants may be used instead of polysorbate 80; the fraction size of polyethylene glycol may be varied; other biocompatible polymers may replace polyethylene glycol, e.g. polyvinyl pyrrolidone; and other sugars or polysaccharides may substitute for dextrose. Alternatively, other delivery systems for hydrophobic pharmaceutical compounds may be employed. Liposomes and emulsions are well known examples of delivery vehicles or carriers for hydrophobic drugs. Certain organic solvents such as dimethylsulfoxide also may be employed, although usually at the cost of greater toxicity. Additionally, the compounds may be delivered using a sustained-release system, such as semipermeable matrices of solid hydrophobic polymers containing the therapeutic agent. Various types of sustained-release materials have been established and are well known by those skilled in the art. Sustained-release capsules may, depending on their chemical nature, release the compounds for a few weeks up to over 100 days. Depending on the chemical nature and the biological stability of the therapeutic reagent, additional strategies for protein or other active ingredient stabilization may be employed.

[0316] The pharmaceutical compositions also may comprise suitable solid or gel phase carriers or excipients. Examples of such carriers or excipients include but are not limited to calcium carbonate, calcium phosphate, various sugars, starches, cellulose derivatives, gelatin, and polymers such as polyethylene glycols. Many of the active ingredients of the invention may be provided as salts with pharmaceutically compatible counter ions. Such pharmaceutically acceptable base addition salts are those salts which retain the biological effectiveness and properties of the free acids and which are obtained by reaction with inorganic or organic bases such as sodium hydroxide, magnesium hydroxide, ammonia, trialkylamine, dialkylamine, monoalkylamine, dibasic amino acids, sodium acetate, potassium benzoate, triethanol amine and the like.

[0317] The pharmaceutical composition of the invention may be in the form of a complex of the protein(s) or other active ingredient(s) of present invention along with protein or peptide antigens. The protein and/or peptide antigen will deliver a stimulatory signal to both B and T lymphocytes. B lymphocytes will respond to antigen through their surface immunoglobulin receptor. T lymphocytes will respond to antigen through the T cell receptor (TCR) following presentation of the antigen by MHC proteins. MHC and structurally related proteins including those encoded by class I and class II MHC genes on host cells will serve to present the peptide antigen(s) to T lymphocytes. The antigen components could also be supplied as purified MHC-peptide complexes alone or with co-stimulatory molecules that can directly signal T cells. Alternatively antibodies able to bind surface immunoglobulin and other molecules on B cells as well as antibodies able to bind the TCR and other molecules on T cells can be combined with the pharmaceutical composition of the invention.

[0318] The pharmaceutical composition of the invention may be in the form of a liposome in which protein of the present invention is combined, in addition to other pharmaceutically acceptable carriers, with amphipathic agents such as lipids which exist in aggregated form as micelles, insoluble monolayers, liquid crystals, or lamellar layers in aqueous solution. Suitable lipids for liposomal formulation include, without limitation, monoglycerides, diglycerides, sulfatides, lysolecithins, phospholipids, saponin, bile acids, and the like. Preparation of such liposomal formulations is within the level of skill in the art, as disclosed, for example, in U.S. Pat. Nos. 4,235,871; 4,501,728; 4,837,028; and 4,737,323, all of which are incorporated herein by reference.

[0319] The amount of protein or other active ingredient of the present invention in the pharmaceutical composition of the present invention will depend upon the nature and severity of the condition being treated, and on the nature of prior treatments which the patient has undergone. Ultimately, the attending physician will decide the amount of protein or other active ingredient of the present invention with which to treat each individual patient. Initially, the attending physician will administer low doses of protein or other active ingredient of the present invention and observe the patient's response. Larger doses of protein or other active ingredient of the present invention may be administered until the optimal therapeutic effect is obtained for the patient, and at that point the dosage is not increased further. It is contemplated that the various pharmaceutical compositions used to practice the method of the present invention should contain about 0.01 μg to about 100 mg (preferably about 0.1 μg to about 10 mg, more preferably about 0.1 μg to about 1 mg) of protein or other active ingredient of the present invention per kg body weight. For compositions of the present invention which are useful for bone, cartilage, tendon or ligament regeneration, the therapeutic method includes administering the composition topically, systematically, or locally as an implant or device. When administered, the therapeutic composition for use in this invention is, of course, in a pyrogen-free, physiologically acceptable form. Further, the composition may desirably be encapsulated or injected in a viscous form for delivery to the site of bone, cartilage or tissue damage. Topical administration may be suitable for wound healing and tissue repair. Therapeutically useful agents other than a protein or other active ingredient of the invention which may also optionally be included in the composition as described above, may alternatively or additionally, be administered simultaneously or sequentially with the composition in the methods of the invention. Preferably for bone and/or cartilage formation, the composition would include a matrix capable of delivering the protein-containing or other active ingredient-containing composition to the site of bone and/or cartilage damage, providing a structure for the developing bone and cartilage and optimally capable of being resorbed into the body. Such matrices may be formed of materials presently in use for other implanted medical applications.

[0320] The choice of matrix material is based on biocompatibility, biodegradability, mechanical properties, cosmetic appearance and interface properties. The particular application of the compositions will define the appropriate formulation. Potential matrices for the compositions may be biodegradable and chemically defined calcium sulfate, tricalcium phosphate, hydroxyapatite, polylactic acid, polyglycolic acid and polyanhydrides. Other potential materials are biodegradable and biologically well-defined, such as bone or dermal collagen. Further matrices are comprised of pure proteins or extracellular matrix components. Other potential matrices are nonbiodegradable and chemically defined, such as sintered hydroxyapatite, bioglass, aluminates, or other ceramics. Matrices may be comprised of combinations of any of the above-mentioned types of material, such as polylactic acid and hydroxyapatite or collagen and tricalcium phosphate. The bioceramics may be altered in composition, such as in calcium-aluminate-phosphate and processing to alter pore size, particle size, particle shape, and biodegradability. Presently preferred is a 50:50 (mole weight) copolymer of lactic acid and glycolic acid in the form of porous particles having diameters ranging from 150 to 800 microns. In some applications, it will be useful to utilize a sequestering agent, such as carboxymethyl cellulose or autologous blood clot, to prevent the protein compositions from disassociating from the matrix.

[0321] A preferred family of sequestering agents is cellulosic materials such as alkylcelluloses (including hydroxyalkylcelluloses), including methylcellulose, ethylcellulose, hydroxyethylcellulose, hydroxypropylcellulose, hydroxypropyl-methylcellulose, and carboxymethylcellulose, the most preferred being cationic salts of carboxymethylcellulose (CMC). Other preferred sequestering agents include hyaluronic acid, sodium alginate, poly(ethylene glycol), polyoxyethylene oxide, carboxyvinyl polymer and poly(vinyl alcohol). The amount of sequestering agent useful herein is 0.5-20 wt %, preferably 1-10 wt % based on total formulation weight, which represents the amount necessary to prevent desorption of the protein from the polymer matrix and to provide appropriate handling of the composition, yet not so much that the progenitor cells are prevented from infiltrating the matrix, thereby providing the protein the opportunity to assist the osteogenic activity of the progenitor cells. In further compositions, proteins or other active ingredients of the invention may be combined with other agents beneficial to the treatment of the bone and/or cartilage defect, wound, or tissue in question. These agents include various growth factors such as epidermal growth factor (EGF), platelet derived growth factor (PDGF), transforming growth factors (TGF-o and TGF-β), and insulin-like growth factor (IGF).

[0322] The therapeutic compositions are also presently valuable for veterinary applications. Particularly domestic animals and thoroughbred horses, in addition to humans, are desired patients for such treatment with proteins or other active ingredients of the present invention. The dosage regimen of a protein-containing pharmaceutical composition to be used in tissue regeneration will be determined by the attending physician considering various factors which modify the action of the proteins, e.g. amount of tissue weight desired to be formed, the site of damage, the condition of the damaged tissue, the size of a wound, type of damaged tissue (e.g., bone), the patient's age, sex, and diet, the severity of any infection, time of administration and other clinical factors. The dosage may vary with the type of matrix used in the reconstitution and with inclusion of other proteins in the pharmaceutical composition. For example, the addition of other known growth factors, such as IGF I (insulin like growth factor I), to the final composition, may also effect the dosage. Progress can be monitored by periodic assessment of tissue/bone growth and/or repair, for example, X-rays, histomorphometric determinations and tetracycline labeling.

[0323] Polynucleotides of the present invention can also be used for gene therapy. Such polynucleotides can be introduced either in vivo or ex vivo into cells for expression in a mammalian subject. Polynucleotides of the invention may also be administered by other known methods for introduction of nucleic acid into a cell or organism (including, without limitation, in the form of viral vectors or naked DNA). Cells may also be cultured ex vivo in the presence of proteins of the present invention in order to proliferate or to produce a desired effect on or activity in such cells. Treated cells can then be introduced in vivo for therapeutic purposes.

[0324] 4.12.3 Effective Dosage

[0325] Pharmaceutical compositions suitable for use in the present invention include compositions wherein the active ingredients are contained in an effective amount to achieve its intended purpose. More specifically, a therapeutically effective amount means an amount effective to prevent development of or to alleviate the existing symptoms of the subject being treated. Determination of the effective amount is well within the capability of those skilled in the art, especially in light of the detailed disclosure provided herein. For any compound used in the method of the invention, the therapeutically effective dose can be estimated initially from appropriate in vitro assays. For example, a dose can be formulated in animal models to achieve a circulating concentration range that can be used to more accurately determine useful doses in humans. For example, a dose can be formulated in animal models to achieve a circulating concentration range that includes the IC₅₀ as determined in cell culture (i.e., the concentration of the test compound which achieves a half-maximal inhibition of the protein's biological activity). Such information can be used to more accurately determine useful doses in humans.

[0326] A therapeutically effective dose refers to that amount of the compound that results in amelioration of symptoms or a prolongation of survival in a patient. Toxicity and therapeutic efficacy of such compounds can be determined by standard pharmaceutical procedures in cell cultures or experimental animals, e.g., for determining the LD₅₀ (the dose lethal to 50% of the population) and the ED₅₀ (the dose therapeutically effective in 50% of the population). The dose ratio between toxic and therapeutic effects is the therapeutic index and it can be expressed as the ratio between LD₅₀ and ED₅₀. Compounds which exhibit high therapeutic indices are preferred. The data obtained from these cell culture assays and animal studies can be used in formulating a range of dosage for use in human. The dosage of such compounds lies preferably within a range of circulating concentrations that include the ED₅₀ with little or no toxicity. The dosage may vary within this range depending upon the dosage form employed and the route of administration utilized. The exact formulation, route of administration and dosage can be chosen by the individual physician in view of the patient's condition. See, e.g., Fingl et al., 1975, in “The Pharmacological Basis of Therapeutics”, Ch. 1 p. 1. Dosage amount and interval may be adjusted individually to provide plasma levels of the active moiety which are sufficient to maintain the desired effects, or minimal effective concentration (MEC). The MEC will vary for each compound but can be estimated from in vitro data. Dosages necessary to achieve the MEC will depend on individual characteristics and route of administration. However, BPLC assays or bioassays can be used to determine plasma concentrations.

[0327] Dosage intervals can also be determined using MEC value. Compounds should be administered using a regimen which maintains plasma levels above the MEC for 1O-90% of the time, preferably between 30-90% and most preferably between 50-90%. In cases of local administration or selective uptake, the effective local concentration of the drug may not be related to plasma concentration.

[0328] An exemplary dosage regimen for polypeptides or other compositions of the invention will be in the range of about 0.01 μg/kg to 100 mg/kg of body weight daily, with the preferred dose being about 0.1 μg/kg to 25 mg/kg of patient body weight daily, varying in adults and children. Dosing may be once daily, or equivalent doses may be delivered at longer or shorter intervals.

[0329] The amount of composition administered will, of course, be dependent on the subject being treated, on the subject's age and weight, the severity of the affliction, the manner of administration and the judgment of the prescribing physician.

[0330] 4.12.4 Packaging

[0331] The compositions may, if desired, be presented in a pack or dispenser device which may contain one or more unit dosage forms containing the active ingredient. The pack may, for example, comprise metal or plastic foil, such as a blister pack. The pack or dispenser device may be accompanied by instructions for administration. Compositions comprising a compound of the invention formulated in a compatible pharmaceutical carrier may also be prepared, placed in an appropriate container, and labeled for treatment of an indicated condition.

[0332] 4.13 Antibodies

[0333] Also included in the invention are antibodies to proteins, or fragments of proteins of the invention. The term “antibody” as used herein refers to immunoglobulin molecules and immunologically active portions of immunoglobulin (Ig) molecules, i.e., molecules that contain an antigen-binding site that specifically binds (immunoreacts with) an antigen. Such antibodies include, but are not limited to, polyclonal, monoclonal, chimeric, single chain, F_{ab}, F_{ab′}, and F_{(ab′)2} fragments, and an F_{ab} expression library. In general, an antibody molecule obtained from humans relates to any of the classes IgG, IgM, IgA, IgE and IgD, which differ from one another by the nature of the heavy chain present in the molecule. Certain classes have subclasses as well, such as IgG_{1,} IgG₂, and others. Furthermore, in humans, the light chain may be a kappa chain or a lambda chain. Reference herein to antibodies includes a reference to all such classes, subclasses and types of human antibody species.

[0334] An isolated related protein of the invention may be intended to serve as an antigen, or a portion or fragment thereof, and additionally can be used as an immunogen to generate antibodies that immunospecifically bind the antigen, using standard techniques for polyclonal and monoclonal antibody preparation The full-length protein can be used or, alternatively, the invention provides antigenic peptide fragments of the antigen for use as immunogens. An antigenic peptide fragment comprises at least 6 amino acid residues of the amino acid sequence of the full length protein, such as an amino acid sequence shown in SEQ ID NO: 1-244, or 489-706, and encompasses an epitope thereof such that an antibody raised against the peptide forms a specific immune complex with the full length protein or with any fragment that contains the epitope. Preferably, the antigenic peptide comprises at least 10 amino acid residues, or at least 15 amino acid residues, or at least 20 amino acid residues, or at least 30 amino acid residues. Preferred epitopes encompassed by the antigenic peptide are regions of the protein that are located on its surface; commonly these are hydrophilic regions.

[0335] In certain embodiments of the invention, at least one epitope encompassed by the antigenic peptide is a surface region of the protein, e.g., a hydrophilic region. A hydrophobicity analysis of the human related protein sequence will indicate which regions of a related protein are particularly hydrophilic and, therefore, are likely to encode surface residues useful for targeting antibody production. As a means for targeting antibody production, hydropathy plots showing regions of hydrophilicity and hydrophobicity may be generated by any method well known in the art, including, for example, the Kyte Doolittle or the Hopp Woods methods, either with or without Fourier transformation. See, e.g., Hopp and Woods, 1981, Proc. Nat. Acad. Sci. USA 78: 3824-3828; Kyte and Doolittle 1982, J. Mol. Biol. 157: 105-142, each of which is incorporated herein by reference in its entirety. Antibodies that are specific for one or more domains within an antigenic protein, or derivatives, fragments, analogs or homologs thereof, are also provided herein.

[0336] A protein of the invention, or a derivative, fragment, analog, homolog or ortholog thereof, may be utilized as an immunogen in the generation of antibodies that immunospecifically bind these protein components.

[0337] The term “specific for” indicates that the variable regions of the antibodies of the invention recognize and bind polypeptides of the invention exclusively (i.e., able to distinguish the polypeptide of the invention from other similar polypeptides despite sequence identity, homology, or similarity found in the family of polypeptides), but may also interact with other proteins (for example, S. aureus protein A or other antibodies in ELISA techniques) through interactions with sequences outside the variable region of the antibodies, and in particular, in the constant region of the molecule. Screening assays to determine binding specificity of an antibody of the invention are well known and routinely practiced in the art. For a comprehensive discussion of such assays, see Harlow et al. (Eds), Antibodies A Laboratory Manual; Cold Spring Harbor Laboratory; Cold Spring Harbor, N.Y. (1988), Chapter 6. Antibodies that recognize and bind fragments of the polypeptides of the invention are also contemplated, provided that the antibodies are first and foremost specific for, as defined above, full-length polypeptides of the invention. As with antibodies that are specific for full length polypeptides of the invention, antibodies of the invention that recognize fragments are those which can distinguish polypeptides from the same family of polypeptides despite inherent sequence identity, homology, or similarity found in the family of proteins.

[0338] Antibodies of the invention are useful for, for example, therapeutic purposes (by modulating activity of a polypeptide of the invention), diagnostic purposes to detect or quantitate a polypeptide of the invention, as well as purification of a polypeptide of the invention. Kits comprising an antibody of the invention for any of the purposes described herein are also comprehended. In general, a kit of the invention also includes a control antigen for which the antibody is immunospecific. The invention further provides a hybridoma that produces an antibody according to the invention. Antibodies of the invention are useful for detection and/or purification of the polypeptides of the invention.

[0339] Monoclonal antibodies binding to the protein of the invention may be useful diagnostic agents for the immunodetection of the protein. Neutralizing monoclonal antibodies binding to the protein may also be useful therapeutics for both conditions associated with the protein and also in the treatment of some forms of cancer where abnormal expression of the protein is involved. In the case of cancerous cells or leukemic cells, neutralizing monoclonal antibodies against the protein may be useful in detecting and preventing the metastatic spread of the cancerous cells, which may be mediated by the protein.

[0340] The labeled antibodies of the present invention can be used for in vitro, in vivo, and in situ assays to identify cells or tissues in which a fragment of the polypeptide of interest is expressed. The antibodies may also be used directly in therapies or other diagnostics. The present invention further provides the above-described antibodies immobilized on a solid support. Examples of such solid supports include plastics such as polycarbonate, complex carbohydrates such as agarose and Sepharose®, acrylic resins and such as polyacrylamide and latex beads. Techniques for coupling antibodies to such solid supports are well known in the art (Weir, D. M. et al., “Handbook of Experimental Immunology” 4th Ed., Blackwell Scientific Publications, Oxford, England, Chapter 10 (1986); Jacoby, W. D. et al., Meth. Enzym. 34 Academic Press, N.Y. (1974)). The immobilized antibodies of the present invention can be used for in vitro, in vivo, and in situ assays as well as for immuno-affinity purification of the proteins of the present invention.

[0341] Various procedures known within the art may be used for the production of polyclonal or monoclonal antibodies directed against a protein of the invention, or against derivatives, fragments, analogs homologs or orthologs thereof (see, for example, Antibodies: A Laboratory Manual, Harlow E, and Lane D, 1988, Cold Spring Harbor Laboratory Press, Cold Spring Harbor, N.Y., incorporated herein by reference). Some of these antibodies are discussed below.

[0342] 4.13.1 Polyclonal Antibodies

[0343] For the production of polyclonal antibodies, various suitable host animals (e.g., rabbit, goat, mouse or other mammal) may be immunized by one or more injections with the native protein, a synthetic variant thereof, or a derivative of the foregoing. An appropriate immunogenic preparation can contain, for example, the naturally occurring immunogenic protein, a chemically synthesized polypeptide representing the immunogenic protein, or a recombinantly expressed immunogenic protein. Furthermore, the protein may be conjugated to a second protein known to be immunogenic in the mammal being immunized. Examples of such immunogenic proteins include but are not limited to keyhole limpet hemocyanin, serum albumin, bovine thyroglobulin, and soybean trypsin inhibitor. The preparation can further include an adjuvant. Various adjuvants used to increase the immunological response include, but are not limited to, Freund's (complete and incomplete), mineral gels (e.g., aluminum hydroxide), surface-active substances (e.g., lysolecithin, pluronic polyols, polyanions, peptides, oil emulsions, dinitrophenol, etc.), adjuvants usable in humans such as Bacille Calmette-Guerin and Corynebacterium parvum, or similar immunostimulatory agents. Additional examples of adjuvants that can be employed include MPL-TDM adjuvant (monophosphoryl Lipid A, synthetic trehalose dicorynomycolate).

[0344] The polyclonal antibody molecules directed against the immunogenic protein can be isolated from the mammal (e.g., from the blood) and further purified by well known techniques, such as affinity chromatography using protein A or protein G, which provide primarily the IgG fraction of immune serum. Subsequently, or alternatively, the specific antigen which is the target of the immunoglobulin sought, or an epitope thereof, may be immobilized on a column to purify the immune specific antibody by immunoaffinity chromatography. Purification of immunoglobulins is discussed, for example, by D. Wilkinson (The Scientist, published by The Scientist, Inc., Philadelphia Pa., Vol. 14, No. 8 (Apr. 17, 2000), pp. 25-28).

[0345] 4.13.2 Monoclonal Antibodies

[0346] The term “monoclonal antibody” (MAb) or “monoclonal antibody composition”, as used herein, refers to a population of antibody molecules that contain only one molecular species of antibody molecule consisting of a unique light chain gene product and a unique heavy chain gene product. In particular, the complementarity determining regions (CDRs) of the monoclonal antibody are identical in all the molecules of the population. MAbs thus contain an antigen-binding site capable of immunoreacting with a particular epitope of the antigen characterized by a unique binding affinity for it.

[0347] Monoclonal antibodies can be prepared using hybridoma methods, such as those described by Kohler and Milstein, Nature, 256, 495 (1975). In a hybridoma method, a mouse, hamster, or other appropriate host animal, is typically immunized with an immunizing agent to elicit lymphocytes that produce or are capable of producing antibodies that will specifically bind to the immunizing agent. Alternatively, the lymphocytes can be immunized in vitro.

[0348] The immunizing agent will typically include the protein antigen, a fragment thereof or a fusion protein thereof. Generally, either peripheral blood lymphocytes are used if cells of human origin are desired, or spleen cells or lymph node cells are used if non-human mammalian sources are desired. The lymphocytes are then fused with an immortalized cell line using a suitable fusing agent, such as polyethylene glycol, to form a hybridoma cell (Goding, Monoclonal Antibodies: Principles and Practice, Academic Press, (1986) pp. 59-103). Immortalized cell lines are usually transformed mammalian cells, particularly myeloma cells of rodent, bovine and human origin. Usually, rat or mouse myeloma cell lines are employed. The hybridoma cells can be cultured in a suitable culture medium that preferably contains one or more substances that inhibit the growth or survival of the unfused, immortalized cells. For example, if the parental cells lack the enzyme hypoxanthine guanine phosphoribosyl transferase (HGPRT or KPRT), the culture medium for the hybridomas typically will include hypoxanthine, aminopterin, and thymidine (“HAT medium”), which substances prevent the growth of HGPRT-deficient cells.

[0349] Preferred immortalized cell lines are those that fuse efficiently, support stable high level expression of antibody by the selected antibody-producing cells, and are sensitive to a medium such as HAT medium. More preferred immortalized cell lines are murine myeloma lines, which can be obtained, for instance, from the Salk Institute Cell Distribution Center, San Diego, Calif. and the American Type Culture Collection, Manassas, Va. Human myeloma and mouse-human heteromyeloma cell lines also have been described for the production of human monoclonal antibodies (Kozbor, J.

[0350] Immunol., 133:3001 (1984); Brodeur et al., Monoclonal Antibody Production Techniques and Applications, Marcel Dekker, Inc., New York, (1987) pp. 51-63).

[0351] The culture medium in which the hybridoma cells are cultured can then be assayed for the presence of monoclonal antibodies directed against the antigen. Preferably, the binding specificity of monoclonal antibodies produced by the hybridoma cells is determined by immunoprecipitation or by an in vitro binding assay, such as radioimmunoassay (RIA) or enzyme-linked immunoabsorbent assay (ELISA). Such techniques and assays are known in the art. The binding affinity of the monoclonal antibody can, for example, be determined by the Scatchard analysis of Munson and Pollard, Anal. Biochem., 107, 220 (1980). Preferably, antibodies having a high degree of specificity and a high binding affinity for the target antigen are isolated.

[0352] After the desired hybridoma cells are identified, the clones can be subcloned by limiting dilution procedures and grown by standard methods. Suitable culture media for this purpose include, for example, Dulbecco's Modified Eagle's Medium and RPMI-1640 medium. Alternatively, the hybridoma cells can be grown in vivo as ascites in a mammal.

[0353] The monoclonal antibodies secreted by the subclones can be isolated or purified from the culture medium or ascites fluid by conventional immunoglobulin purification procedures such as, for example, protein A-Sepharose, hydroxylapatite chromatography, gel electrophoresis, dialysis, or affinity chromatography.

[0354] The monoclonal antibodies can also be made by recombinant DNA methods, such as those described in U.S. Pat. No. 4,816,567. DNA encoding the monoclonal antibodies of the invention can be readily isolated and sequenced using conventional procedures (e.g., by using oligonucleotide probes that are capable of binding specifically to genes encoding the heavy and light chains of murine antibodies). The hybridoma cells of the invention serve as a preferred source of such DNA. Once isolated, the DNA can be placed into expression vectors, which are then transfected into host cells such as simian COS cells, Chinese hamster ovary (CHO) cells, or myeloma cells that do not otherwise produce immunoglobulin protein, to obtain the synthesis of monoclonal antibodies in the recombinant host cells, The DNA also can be modified, for example, by substituting the coding sequence for human heavy and light chain constant domains in place of the homologous murine sequences (U.S. Pat. No. 4,816,567; Morrison, Nature 368, 812-13 (1994)) or by covalently joining to the immunoglobulin coding sequence all or part of the coding sequence for a non-immunoglobulin polypeptide. Such a non-immunoglobulin polypeptide can be substituted for the constant domains of an antibody of the invention, or can be substituted for the variable domains of one antigen-combining site of an antibody of the invention to create a chimeric bivalent antibody.

[0355] 4.13.3 Humanized Antibodies

[0356] The antibodies directed against the protein antigens of the invention can further comprise humanized antibodies or human antibodies. These antibodies are suitable for administration to humans without engendering an immune response by the human against the administered immunoglobulin. Humanized forms of antibodies are chimeric immunoglobulins, immunoglobulin chains or fragments thereof (such as Fv, Fab, Fab′, F(ab′)₂ or other antigen-binding subsequences of antibodies) that are principally comprised of the sequence of a human immunoglobulin, and contain minimal sequence derived from a non-human immunoglobulin. Humanization can be performed following the method of Winter and co-workers (Jones et al., Nature, 321, 522-525 (1986); Riechmann et al., Nature, 332, 323-327 (1988); Verhoeyen et al., Science, 239, 1534-1536 (1988)), by substituting rodent CDRs or CDR sequences for the corresponding sequences of a human antibody. (See also U.S. Pat. No. 5,225,539). In some instances, Fv framework residues of the human immunoglobulin are replaced by corresponding non-human residues. Humanized antibodies can also comprise residues that are found neither in the recipient antibody nor in the imported CDR or framework sequences. In general, the humanized antibody will comprise substantially all of at least one, and typically two, variable domains, in which all or substantially all of the CDR regions correspond to those of a non-human immunoglobulin and all or substantially all of the framework regions are those of a human immunoglobulin consensus sequence. The humanized antibody optimally also will comprise at least a portion of an immunoglobulin constant region (Fc), typically that of a human immunoglobulin (Jones et al., 1986; Riechmann et al., 1988; and Presta, Curr. Op. Struct. Biol., 2, 593-596 (1992)).

[0357] 4.13.4 Human Antibodies

[0358] Fully human antibodies relate to antibody molecules in which essentially the entire sequences of both the light chain and the heavy chain, including the CDRs, arise from human genes. Such antibodies are termed “human antibodies”, or “fully human antibodies” herein. Human monoclonal antibodies can be prepared by the trioma technique; the human B-cell hybridoma technique (see Kozbor, et al., 1983 Immunol Today 4: 72) and the EBV hybridoma technique to produce human monoclonal antibodies (see Cole, et al., 1985 In: Monoclonal Antibodies and Cancer Therapy, Alan R Liss, Inc., pp. 77-96). Human monoclonal antibodies may be utilized in the practice of the present invention and may be produced by using human hybridomas (see Cote, et al., 1983. Proc Natl Acad Sci USA 80, 2026-2030) or by transforming human B-cells with Epstein Barr Virus in vitro (see Cole, et al., 1985 In: Monoclonal Antibodies and Cancer Therapy, Alan R. Liss, Inc., pp. 77-96).

[0359] In addition, human antibodies can also be produced using additional techniques, including phage display libraries (Hoogenboom and Winter, J. Mol. Biol., 227, 381 (1991); Marks et al., J. Mol. Biol., 222:581 (1991)). Similarly, human antibodies can be made by introducing human immunoglobulin loci into transgenic animals, e.g., mice in which the endogenous immunoglobulin genes have been partially or completely inactivated. Upon challenge, human antibody production is observed, which closely resembles that seen in humans in all respects, including gene rearrangement, assembly, and antibody repertoire. This approach is described, for example, in U.S. Pat. Nos. 5,545,807; 5,545,806; 5,569,825; 5,625,126; 5,633,425; 5,661,016, and in Marks et al. (Bio/Technology 10, 779-783 (1992)); Lonberg et al. (Nature 368, 856-859 (1994)); Morrison (Nature 368, 812-13 (1994)); Fishwild et al, (Nature Biotechnology 14, 845-51 (1996)); Neuberger (Nature Biotechnology 14, 826 (1996)); and Lonberg and Huszar (Intern. Rev. Immunol. 13, 65-93 (1995)).

[0360] Human antibodies may additionally be produced using transgenic nonhuman animals that are modified so as to produce fully human antibodies rather than the animal's endogenous antibodies in response to challenge by an antigen. (See PCT publication WO94/02602). The endogenous genes encoding the heavy and light immunoglobulin chains in the nonhuman host have been incapacitated, and active loci encoding human heavy and light chain immunoglobulins are inserted into the host's genome. The human genes are incorporated, for example, using yeast artificial chromosomes containing the requisite human DNA segments. An animal which provides all the desired modifications is then obtained as progeny by crossbreeding intermediate transgenic animals containing fewer than the full complement of the modifications. The preferred embodiment of such a nonhuman animal is a mouse, and is termed the Xenomouse™ as disclosed in PCT publications WO 96/33735 and WO 96/34096. This animal produces B cells that secrete fully human immunoglobulins. The antibodies can be obtained directly from the animal after immunization with an immunogen of interest, as, for example, a preparation of a polyclonal antibody, or alternatively from immortalized B cells derived from the animal, such as hybridomas producing monoclonal antibodies. Additionally, the genes encoding the immunoglobulins with human variable regions can be recovered and expressed to obtain the antibodies directly, or can be farther modified to obtain analogs of antibodies such as, for example, single chain Fv molecules.

[0361] An example of a method of producing a nonhuman host, exemplified as a mouse, lacking expression of an endogenous immunoglobulin heavy chain is disclosed in U.S. Pat. No. 5,939,598. It can be obtained by a method including deleting the J segment genes from at least one endogenous heavy chain locus in an embryonic stem cell to prevent rearrangement of the locus and to prevent formation of a transcript of a rearranged immunoglobulin heavy chain locus, the deletion being effected by a targeting vector containing a gene encoding a selectable marker; and producing from the embryonic stem cell a transgenic mouse whose somatic and germ cells contain the gene encoding the selectable marker.

[0362] A method for producing an antibody of interest, such as a human antibody, is disclosed in U.S. Pat. No. 5,916,771. It includes introducing an expression vector that contains a nucleotide sequence encoding a heavy chain into one mammalian host cell in culture, introducing an expression vector containing a nucleotide sequence encoding a light chain into another mammalian host cell, and fusing the two cells to form a hybrid cell. The hybrid cell expresses an antibody containing the heavy chain and the light chain.

[0363] In a further improvement on this procedure, a method for identifying a clinically relevant epitope on an immunogen, and a correlative method for selecting an antibody that binds immunospecifically to the relevant epitope with high affinity, are disclosed in PCT publication WO 99/53049.

[0364] 4.13.5 Far Fragments and Single Chain Antibodies

[0365] According to the invention, techniques can be adapted for the production of single-chain antibodies specific to an antigenic protein of the invention (see e.g., U.S. Pat. No. 4,946,778). In addition, methods can be adapted for the construction of Fab expression libraries (see e.g., Huse, et al., 1989 Science 246, 1275-1281) to allow rapid and effective identification of monoclonal Fab fragments with the desired specificity for a protein or derivatives, fragments, analogs or homologs thereof Antibody fragments that contain the idiotypes to a protein antigen may be produced by techniques known in the art including, but not limited to: (i) an F_{(ab′)2} fragment produced by pepsin digestion of an antibody molecule; (ii) an F_{ab} fragment generated by reducing the disulfide bridges of an F_{(ab′)2} fragment; (iii) an F_{ab} fragment generated by the treatment of the antibody molecule with papain and a reducing agent and (iv) Fᵥ fragments.

[0366] 4.13.6 Bispecific Antibodies

[0367] Bispecific antibodies are monoclonal, preferably human or humanized, antibodies that have binding specificities for at least two different antigens. In the present case, one of the binding specificities is for an antigenic protein of the invention. The second binding target is any other antigen, and advantageously is a cell-surface protein or receptor or receptor subunit.

[0368] Methods for making bispecific antibodies are known in the art. Traditionally, the recombinant production of bispecific antibodies is based on the co-expression of two immunoglobulin heavy-chain/light-chain pairs, where the two heavy chains have different specificities (Mistein and Cuello, Nature, 305, 537-539 (1983)). Because of the random assortment of immunoglobulin heavy and light chains, these hybridomas (quadromas) produce a potential mixture of ten different antibody molecules, of which only one has the correct bispecific structure. The purification of the correct molecule is usually accomplished by affinity chromatography steps. Similar procedures are disclosed in WO 93/08829, published May 13, 1993, and in Traunecker et al., 1991 EMBO J., 10, 3655-3659.

[0369] Antibody variable domains with the desired binding specificities (antibody-antigen combining sites) can be fused to immunoglobulin constant domain sequences. The fusion preferably is with an immunoglobulin heavy-chain constant domain, comprising at least part of the hinge, CH2, and CH3 regions. It is preferred to have the first heavy-chain constant region (CHI) containing the site necessary for light-chain binding present in at least one of the fusions. DNAs encoding the immunoglobulin heavy-chain fusions and, if desired, the immunoglobulin light chain, are inserted into separate expression vectors, and are co-transfected into a suitable host organism. For further details of generating bispecific antibodies see, for example, Suresh et al., Methods in Enzymology, 121, 210 (1986).

[0370] According to another approach described in WO 96/27011, the interface between a pair of antibody molecules can be engineered to maximize the percentage of heterodimers that are recovered from recombinant cell culture. The preferred interface comprises at least a part of the CH3 region of an antibody constant domain. In this method, one or more small amino acid side chains from the interface of the first antibody molecule are replaced with larger side chains (e.g. tyrosine or tryptophan). Compensatory “cavities” of identical or similar size to the large side chain(s) are created on the interface of the second antibody molecule by replacing large amino acid side chains with smaller ones (e.g. alanine or threonine). This provides a mechanism for increasing the yield of the heterodimer over other unwanted end-products such as homodimers.

[0371] Bispecific antibodies can be prepared as full-length antibodies or antibody fragments (e.g. F(ab′)₂ bispecific antibodies). Techniques for generating bispecific antibodies from antibody fragments have been described in the literature. For example, bispecific antibodies can be prepared using chemical linkage. Brennan et al., Science 229, 81 (1985) describe a procedure wherein intact antibodies are proteolytically cleaved to generate F(ab′)₂ fragments. These fragments are reduced in the presence of the dithiol complexing agent sodium arsenite to stabilize vicinal dithiols and prevent intermolecular disulfide formation. The Fab′ fragments generated are then converted to thionitrobenzoate (TNB) derivatives. One of the Fab′-TNB derivatives is then reconverted to the Fab′-thiol by reduction with mercaptoethylamine and is mixed with an equimolar amount of the other Fab′-TNB derivative to form the bispecific antibody. The bispecific antibodies produced can be used as agents for the selective immobilization of enzymes.

[0372] Additionally, Fab′ fragments can be directly recovered from E. coli and chemically coupled to form bispecific antibodies. Shalaby et al., J. Exp. Med. 175, 217-225 (1992) describe the production of a fully humanized bispecific antibody F(ab′)₂ molecule. Each Fab′ fragment was separately secreted from E. coli and subjected to directed chemical coupling in vitro to form the bispecific antibody. The bispecific antibody thus formed was able to bind to cells overexpressing the ErbB2 receptor and normal human T cells, as well as trigger the lytic activity of human cytotoxic lymphocytes against human breast tumor targets.

[0373] Various techniques for making and isolating bispecific antibody fragments directly from recombinant cell culture have also been described. For example, bispecific antibodies have been produced using leucine zippers. Kostelny et al., J. Immunol. 148(5), 1547-1553 (1992). The leucine zipper peptides from the Fos and Jun proteins were linked to the Fab′ portions of two different antibodies by gene fusion. The antibody homodimers were reduced at the hinge region to form monomers and then re-oxidized to form the antibody heterodimers. This method can also be utilized for the production of antibody homodimers. The “diabody” technology described by Hollinger et al., Proc. Natl. Acad. Sci. USA 90, 6444-6448 (1993) has provided an alternative mechanism for making bispecific antibody fragments. The fragments comprise a heavy-chain variable domain (V_{H}) connected to a light-chain variable domain (V_{L}) by a linker which is too short to allow pairing between the two domains on the same chain. Accordingly, the V_{H} and V_{L} domains of one fragment are forced to pair with the complementary V_{L} and V_{H} domains of another fragment, thereby forming two antigen-binding sites. Another strategy for making bispecific antibody fragments by the use of single-chain Fv (sFv) dimers has also been reported. See, Gruber et al., J. Immunol. 152, 5368 (1994).

[0374] Antibodies with more than two valencies are contemplated. For example, trispecific antibodies can be prepared. Tutt et al., J. Immunol. 147, 60 (1991).

[0375] Exemplary bispecific antibodies can bind to two different epitopes, at least one of which originates in the protein antigen of the invention. Alternatively, an anti-antigenic arm of an immunoglobulin molecule can be combined with an arm which binds to a triggering molecule on a leukocyte such as a T-cell receptor molecule (e.g. CD2, CD3, CD28, or B7), or Fc receptors for IgG (FcγR), such as FcγRI (CD64), FcγRII (CD32) and FcγRIII (CD 16) so as to focus cellular defense mechanisms to the cell expressing the particular antigen. Bispecific antibodies can also be used to direct cytotoxic agents to cells which express a particular antigen. These antibodies possess an antigen-binding arm and an arm which binds a cytotoxic agent or a radionuclide chelator, such as EOTUBE, DPTA, DOTA, or TETA. Another bispecific antibody of interest binds the protein antigen described herein and further binds tissue factor (TF).

[0376] 4.13.7 Heteroconjugate Antibodies

[0377] Heteroconjugate antibodies are also within the scope of the present invention. Heteroconjugate antibodies are composed of two covalently joined antibodies. Such antibodies have, for example, been proposed to target immune system cells to unwanted cells (U.S. Pat. No. 4,676,980), and for treatment of HIV infection (WO 91/00360; WO 92/200373; EP 03089). It is contemplated that the antibodies can be prepared in vitro using known methods in synthetic protein chemistry, including those involving crosslinking agents. For example, immunotoxins can be constructed using a disulfide exchange reaction or by forming a thioether bond. Examples of suitable reagents for this purpose include iminothiolate and methyl-4-mercaptobutyrimidate and those disclosed, for example, in U.S. Pat. No. 4,676,980.

[0378] 4.13.8 Effector Function Engineering

[0379] It can be desirable to modify the antibody of the invention with respect to effector function, so as to enhance, e.g., the effectiveness of the antibody in treating cancer. For example, cysteine residue(s) can be introduced into the Fc region, thereby allowing interchain disulfide bond formation in this region. The homodimeric antibody thus generated can have improved internalization capability and/or increased complement-mediated cell killing and antibody-dependent cellular cytotoxicity (ADCC). See Caron et al., J. Exp Med., 176, 1191-1195 (1992) and Shopes, J. Immunol., 148, 2918-2922 (1992). Homodimeric antibodies with enhanced anti-tumor activity can also be prepared using heterobifunctional cross-linkers as described in Wolff et al. Cancer Research, 53, 2560-2565 (1993). Alternatively, an antibody can be engineered that has dual Fc regions and can thereby have enhanced complement lysis and ADCC capabilities. See Stevenson et al., Anti-Cancer Drug Design, 3, 219-230 (1989).

[0380] 4.13.9 Immunoconjugates

[0381] The invention also pertains to immunoconjugates comprising an antibody conjugated to a cytotoxic agent such as a chemotherapeutic agent, toxin (e.g., an enzymatically active toxin of bacterial, fungal, plant, or animal origin, or fragments thereof), or a radioactive isotope (i.e., a radioconjugate).

[0382] Chemotherapeutic agents useful in the generation of such immunoconjugates have been described above. Enzymatically active toxins and fragments thereof that can be used include diphtheria A chain, nonbinding active fragments of diphtheria toxin, exotoxin A chain (from Pseudomonas aeruginosa), ricin A chain, abrin A chain, modeccin A chain, alpha-sarcin, Aleurites fordii proteins, dianthin proteins, Phytolaca americana proteins (PAPI, PAPII, and PAP-S), momordica charantia inhibitor, curcin, crotin, sapaonaria officinalis inhibitor, gelonin, mitogellin, restrictocin, phenomycin, enomycin, and the tricothecenes. A variety of radionuclides are available for the production of radioconjugated antibodies. Examples include ²¹²Bi, ¹³¹I, ¹³¹In, ⁹⁰Y, and ¹⁸⁶Re.

[0383] Conjugates of the antibody and cytotoxic agent are made using a variety of bifunctional protein-coupling agents such as N-succinimidyl-3-(2-pyridyldithiol) propionate (SPDP), iminothiolane (IT), bifunctional derivatives of imidoesters (such as dimethyl adipimidate HCl), active esters (such as disuccinimidyl suberate), aldehydes (such as glutareldehyde), bis-azido compounds (such as bis (p-azidobenzoyl) hexanediamine), bis-diazonium derivatives (such as bis-(p-diazoniumbenzoyl)-ethylenediamine), diisocyanates (such as tolyene 2,6-diisocyanate), and bis-active fluorine compounds (such as 1,5-difluoro-2,4-dinitrobenzene). For example, a ricin immunotoxin can be prepared as described in Vitetta et al., Science, 238: 1098 (1987). Carbon-14-labeled 1-isothiocyanatobenzyl-3-methyldiethylene triaminepentaacetic acid (MX-DTPA) is an exemplary chelating agent for conjugation of radionucleotide to the antibody. See WO94/11026.

[0384] In another embodiment, the antibody can be conjugated to a “receptor” (such streptavidin) for utilization in tumor pretargeting wherein the antibody-receptor conjugate is administered to the patient, followed by removal of unbound conjugate from the circulation using a clearing agent and then administration of a “ligand” (e.g., avidin) that is in turn conjugated to a cytotoxic agent.

[0385] 4.14 Computer Readable Sequences

[0386] In one application of this embodiment, a nucleotide sequence of the present invention can be recorded on computer readable media. As used herein, “computer readable media” refers to any medium which can be read and accessed directly by a computer. Such media include, but are not limited to: magnetic storage media, such as floppy discs, hard disc storage medium, and magnetic tape; optical storage media such as CD-ROM; electrical storage media such as RAM and ROM; and hybrids of these categories such as magnetic/optical storage media. A skilled artisan can readily appreciate how any of the presently known computer readable mediums can be used to create a manufacture comprising computer readable medium having recorded thereon a nucleotide sequence of the present invention. As used herein, “recorded” refers to a process for storing information on computer readable medium. A skilled artisan can readily adopt any of the presently known methods for recording information on computer readable medium to generate manufactures comprising the nucleotide sequence information of the present invention.

[0387] A variety of data storage structures are available to a skilled artisan for creating a computer readable medium having recorded thereon a nucleotide sequence of the present invention. The choice of the data storage structure will generally be based on the means chosen to access the stored information. In addition, a variety of data processor programs and formats can be used to store the nucleotide sequence information of the present invention on computer readable medium. The sequence information can be represented in a word processing text file, formatted in commercially-available software such as WordPerfect and Microsoft Word, or represented in the form of an ASCII file, stored in a database application, such as DB2, Sybase, Oracle, or the like. A skilled artisan can readily adapt any number of data processor structuring formats (e.g. text file or database) in order to obtain computer readable medium having recorded thereon the nucleotide sequence information of the present invention.

[0388] By providing any of the nucleotide sequences SEQ ID NO: 1-244, or 489-706 or a representative fragment thereof; or a nucleotide sequence at least 95% identical to any of the nucleotide sequences of SEQ ID NO: 1-244, or 489-706 in computer readable form, a skilled artisan can routinely access the sequence information for a variety of purposes. Computer software is publicly available which allows a skilled artisan to access sequence information provided in a computer readable medium. The examples which follow demonstrate how software which implements the BLAST (Altschul et al., J. Mol. Biol. 215:403-410 (1990)) and BLAZE (Brutlag et al., Comp. Chem. 17:203-207 (1993)) search algorithms on a Sybase system is used to identify open reading frames (ORFs) within a nucleic acid sequence. Such ORFs may be protein-encoding fragments and may be useful in producing commercially important proteins such as enzymes used in fermentation reactions and in the production of commercially useful metabolites.

[0389] As used herein, “a computer-based system” refers to the hardware means, software means, and data storage means used to analyze the nucleotide sequence information of the present invention. The minimum hardware means of the computer-based systems of the present invention comprises a central processing unit (CPU), input means, output means, and data storage means. A skilled artisan can readily appreciate that any one of the currently available computer-based systems are suitable for use in the present invention. As stated above, the computer-based systems of the present invention comprise a data storage means having stored therein a nucleotide sequence of the present invention and the necessary hardware means and software means for supporting and implementing a search means. As used herein, “data storage means” refers to memory which can store nucleotide sequence information of the present invention, or a memory access means which can access manufactures having recorded thereon the nucleotide sequence information of the present invention.

[0390] As used herein, “search means” refers to one or more programs which are implemented on the computer-based system to compare a target sequence or target structural motif with the sequence information stored within the data storage means. Search means are used to identify fragments or regions of a known sequence which match a particular target sequence or target motif A variety of known algorithms are disclosed publicly and a variety of commercially available software for conducting search means are and can be used in the computer-based systems of the present invention. Examples of such software includes, but is not limited to, Smith-Waterman, MacPattern (EMBL), BLASTN and BLASTA (NPOLYPEPTIDEIA). A skilled artisan can readily recognize that any one of the available algorithms or implementing software packages for conducting homology searches can be adapted for use in the present computer-based systems. As used herein, a “target sequence” can be any nucleic acid or amino acid sequence of six or more nucleotides or two or more amino acids. A skilled artisan can readily recognize that the longer a target sequence is, the less likely a target sequence will be present as a random occurrence in the database. The most preferred sequence length of a target sequence is from about 10 to 300 amino acids, more preferably from about 30 to 100 nucleotide residues. However, it is well recognized that searches for commercially important fragments, such as sequence fragments involved in gene expression and protein processing, may be of shorter length.

[0391] As used herein, “a target structural motif,” or “target motif,” refers to any rationally selected sequence or combination of sequences in which the sequence(s) are chosen based on a three-dimensional configuration which is formed upon the folding of the target motif There are a variety of target motifs known in the art. Protein target motifs include, but are not limited to, enzyme active sites and signal sequences. Nucleic acid target motifs include, but are not limited to, promoter sequences, hairpin structures and inducible expression elements (protein binding sequences).

[0392] 4.15 Triple Helix Formation

[0393] If In addition, the fragments of the present invention, as broadly described, can be used to control gene expression through triple helix formation or antisense DNA or RNA, both of which methods are based on the binding of a polynucleotide sequence to DNA or RNA. Polynucleotides suitable for use in these methods are preferably 20 to 40 bases in length and are designed to be complementary to a region of the gene involved in transcription (triple helix-see Lee et al., Nucl. Acids Res. 6, 3073 (1979); Cooney et al., Science 15241, 456 (1988); and Dervan et al., Science 251, 1360 (1991)) or to the mRNA itself(antisense-Olmno, J. Neurochem. 56:560 (1991); Oligodeoxynucleotides as Antisense Inhibitors of Gene Expression, CRC Press, Boca Raton, Fla. (1988)). Triple helix-formation optimally results in a shut-off of RNA transcription from DNA, while antisense RNA hybridization blocks translation of an mRNA molecule into polypeptide. Both techniques have been demonstrated to be effective in model systems. Information contained in the sequences of the present invention is necessary for the design of an antisense or triple helix oligonucleotide.

[0394] 4.16 Diagnostic Assays and Kits

[0395] The present invention further provides methods to identify the presence or expression of one of the ORFs of the present invention, or homolog thereof, in a test sample, using a nucleic acid probe or antibodies of the present invention, optionally conjugated or otherwise associated with a suitable label.

[0396] In general, methods for detecting a polynucleotide of the invention can comprise contacting a sample with a compound that binds to and forms a complex with the polynucleotide for a period sufficient to form the complex, and detecting the complex, so that if a complex is detected, a polynucleotide of the invention is detected in the sample. Such methods can also comprise contacting a sample under stringent hybridization conditions with nucleic acid primers that anneal to a polynucleotide of the invention under such conditions, and amplifying annealed polynucleotides, so that if a polynucleotide is amplified, a polynucleotide of the invention is detected in the sample.

[0397] In general, methods for detecting a polypeptide of the invention can comprise contacting a sample with a compound that binds to and forms a complex with the polypeptide for a period sufficient to form the complex, and detecting the complex, so that if a complex is detected, a polypeptide of the invention is detected in the sample.

[0398] In detail, such methods comprise incubating a test sample with one or more of the antibodies or one or more of the nucleic acid probes of the present invention and assaying for binding of the nucleic acid probes or antibodies to components within the test sample.

[0399] Conditions for incubating a nucleic acid probe or antibody with a test sample vary. Incubation conditions depend on the format employed in the assay, the detection methods employed, and the type and nature of the nucleic acid probe or antibody used in the assay. One skilled in the art will recognize that any one of the commonly available hybridization, amplification or immunological assay formats can readily be adapted to employ the nucleic acid probes or antibodies of the present invention. Examples of such assays can be found in Chard, T., An Introduction to Radioimmunoassay and Related Techniques, Elsevier Science Publishers, Amsterdam, The Netherlands (1986); Bullock, G. R. et al., Techniques in Immunocytochemistry, Academic Press, Orlando, Fla. Vol. 1 (1982), Vol. 2 (1983), Vol. 3 (1985); Tijssen, P., Practice and Theory of immunoassays:

[0400] Laboratory Techniques in Biochemistry and Molecular Biology, Elsevier Science Publishers, Amsterdam, The Netherlands (1985). The test samples of the present invention include cells, protein or membrane extracts of cells, or biological fluids such as sputum, blood, serum, plasma, or urine. The test sample used in the above-described method will vary based on the assay format, nature of the detection method and the tissues, cells or extracts used as the sample to be assayed. Methods for preparing protein extracts or membrane extracts of cells are well known in the art and can be readily be adapted in order to obtain a sample which is compatible with the system utilized.

[0401] In another embodiment of the present invention, kits are provided which contain the necessary reagents to carry out the assays of the present invention. Specifically, the invention provides a compartment kit to receive, in close confinement, one or more containers which comprises: (a) a first container comprising one of the probes or antibodies of the present invention; and (b) one or more other containers comprising one or more of the following: wash reagents, reagents capable of detecting presence of a bound probe or antibody.

[0402] In detail, a compartment kit includes any kit in which reagents are contained in separate containers. Such containers include small glass containers, plastic containers or strips of plastic or paper. Such containers allows one to efficiently transfer reagents from one compartment to another compartment such that the samples and reagents are not cross-contaminated, and the agents or solutions of each container can be added in a quantitative fashion from one compartment to another. Such containers will include a container which will accept the test sample, a container which contains the antibodies used in the assay, containers which contain wash reagents (such as phosphate buffered saline, Tris-buffers, etc.), and containers which contain the reagents used to detect the bound antibody or probe. Types of detection reagents include labeled nucleic acid probes, labeled secondary antibodies, or in the alternative, if the primary antibody is labeled, the enzymatic, or antibody binding reagents which are capable of reacting with the labeled antibody. One skilled in the art will readily recognize that the disclosed probes and antibodies of the present invention can be readily incorporated into one of the established kit formats which are well known in the art.

[0403] 4.17 Medical Imaging

[0404] The novel polypeptides and binding partners of the invention are useful in medical imaging of sites expressing the molecules of the invention (e.g., where the polypeptide of the invention is involved in the immune response, for imaging sites of inflammation or infection). See, e.g., Kunkel et al., U.S. Pat. No. 5,413,778. Such methods involve chemical attachment of a labeling or imaging agent, administration of the labeled polypeptide to a subject in a pharmaceutically acceptable carrier, and imaging the labeled polypeptide in vivo at the target site.

[0405] 4.18 Screening Assays

[0406] Using the isolated proteins and polynucleotides of the invention, the present invention further provides methods of obtaining and identifying agents which bind to a polypeptide encoded by an ORF corresponding to any of the nucleotide sequences set forth in SEQ ID NO: 1-244, or 489-706, or bind to a specific domain of the polypeptide encoded by the nucleic acid. In detail, said method comprises the steps of:

[0407] (a) contacting an agent with an isolated protein encoded by an ORF of the present invention, or nucleic acid of the invention; and

[0408] (b) determining whether the agent binds to said protein or said nucleic acid.

[0409] In general, therefore, such methods for identifying compounds that bind to a polynucleotide of the invention can comprise contacting a compound with a polynucleotide of the invention for a time sufficient to form a polynucleotide/compound complex, and detecting the complex, so that if a polynucleotide/compound complex is detected, a compound that binds to a polynucleotide of the invention is identified.

[0410] Likewise, in general, therefore, such methods for identifying compounds that bind to a polypeptide of the invention can comprise contacting a compound with a polypeptide of the invention for a time sufficient to form a polypeptide/compound complex, and detecting the complex, so that if a polypeptide/compound complex is detected, a compound that binds to a polynucleotide of the invention is identified.

[0411] Methods for identifying compounds that bind to a polypeptide of the invention can also comprise contacting a compound with a polypeptide of the invention in a cell for a time sufficient to form a polypeptide/compound complex, wherein the complex drives expression of a receptor gene sequence in the cell, and detecting the complex by detecting reporter gene sequence expression, so that if a polypeptide/compound complex is detected, a compound that binds a polypeptide of the invention is identified.

[0412] Compounds identified via such methods can include compounds which modulate the activity of a polypeptide of the invention (that is, increase or decrease its activity, relative to activity observed in the absence of the compound). Alternatively, compounds identified via such methods can include compounds which modulate the expression of a polynucleotide of the invention (that is, increase or decrease expression relative to expression levels observed in the absence of the compound). Compounds, such as compounds identified via the methods of the invention, can be tested using standard assays well known to those of skill in the art for their ability to modulate activity/expression.

[0413] The agents screened in the above assay can be, but are not limited to, peptides, carbohydrates, vitamin derivatives, or other pharmaceutical agents. The agents can be selected and screened at random or rationally selected or designed using protein modeling techniques.

[0414] For random screening, agents such as peptides, carbohydrates, pharmaceutical agents and the like are selected at random and are assayed for their ability to bind to the protein encoded by the ORF of the present invention. Alternatively, agents may be rationally selected or designed. As used herein, an agent is said to be “rationally selected or designed” when the agent is chosen based on the configuration of the particular protein. For example, one skilled in the art can readily adapt currently available procedures to generate peptides, pharmaceutical agents and the like, capable of binding to a specific peptide sequence, in order to generate rationally designed antipeptide peptides, for example see Hurby et al., Application of Synthetic Peptides: Antisense Peptides,” In Synthetic Peptides, A User's Guide, W. H. Freeman, NY (1992), pp. 289-307, and Kaspczak et al., Biochemistry 28:9230-8 (1989), or pharmaceutical agents, or the like.

[0415] In addition to the foregoing, one class of agents of the present invention, as broadly described, can be used to control gene expression through binding to one of the ORFs or EMFs of the present invention. As described above, such agents can be randomly screened or rationally designed/selected. Targeting the ORF or EMF allows a skilled artisan to design sequence specific or element specific agents, modulating the expression of either a single ORF or multiple ORFs which rely on the same EMF for expression control. One class of DNA binding agents are agents which contain base residues which hybridize or form a triple helix formation by binding to DNA or RNA. Such agents can be based on the classic phosphodiester, ribonucleic acid backbone, or can be a variety of sulfhydryl or polymeric derivatives which have base attachment capacity.

[0416] Agents suitable for use in these methods preferably contain 20 to 40 bases and are designed to be complementary to a region of the gene involved in transcription (triple helix—see Lee et al., Nucl. Acids Res. 6, 3073 (1979); Cooney et al., Science 241, 456 (1988); and Dervan et al., Science 251, 1360 (1991)) or to the mRNA itself (antisense—Okano, J. Neurochem. 56, 560 (1991); Oligodeoxynucleotides as Antisense Inhibitors of Gene Expression, CRC Press, Boca Raton, Fla. (1988)). Triple helix-formation optimally results in a shut-off of RNA transcription from DNA, while antisense RNA hybridization blocks translation of an mRNA molecule into polypeptide. Both techniques have been demonstrated to be effective in model systems. Information contained in the sequences of the present invention is necessary for the design of an antisense or triple helix oligonucleotide and other DNA binding agents.

[0417] Agents which bind to a protein encoded by one of the ORFs of the present invention can be used as a diagnostic agent. Agents which bind to a protein encoded by one of the ORFs of the present invention can be formulated using known techniques to generate a pharmaceutical composition.

[0418] 4.19 Use of Nucleic Acids as Probes

[0419] Another aspect of the subject invention is to provide for polypeptide-specific nucleic acid hybridization probes capable of hybridizing with naturally occurring nucleotide sequences. The hybridization probes of the subject invention may be derived from any of the nucleotide sequences SEQ ID NO: 1-244, or 489-706. Because the corresponding gene is only expressed in a limited number of tissues, a hybridization probe derived from any of the nucleotide sequences SEQ ID NO: 1-244, or 489-706 can be used as an indicator of the presence of RNA of cell type of such a tissue in a sample.

[0420] Any suitable hybridization technique can be employed, such as, for example, in situ hybridization. PCR as described in U.S. Pat. Nos. 4,683,195 and 4,965,188 provides additional uses for oligonucleotides based upon the nucleotide sequences. Such probes used in PCR may be of recombinant origin, may be chemically synthesized, or a mixture of both. The probe will comprise a discrete nucleotide sequence for the detection of identical sequences or a degenerate pool of possible sequences for identification of closely related genomic sequences.

[0421] Other means for producing specific hybridization probes for nucleic acids include the cloning of nucleic acid sequences into vectors for the production of mRNA probes. Such vectors are known in the art and are commercially available and may be used to synthesize RNA probes in vitro by means of the addition of the appropriate RNA polymerase as T7 or SP6 RNA polymerase and the appropriate radioactively labeled nucleotides. The nucleotide sequences may be used to construct hybridization probes for mapping their respective genomic sequences. The nucleotide sequence provided herein may be mapped to a chromosome or specific regions of a chromosome using well-known genetic and/or chromosomal mapping techniques. These techniques include in situ hybridization, linkage analysis against known chromosomal markers, hybridization screening with libraries or flow-sorted chromosomal preparations specific to known chromosomes, and the like. The technique of fluorescent in situ hybridization of chromosome spreads has been described, among other places, in Verma et al (1988) Human Chromosomes: A Manual of Basic Techniques, Pergamon Press, New York N.Y.

[0422] Fluorescent in situ hybridization of chromosomal preparations and other physical chromosome mapping techniques may be correlated with additional genetic map data. Examples of genetic map data can be found in the 1994 Genome Issue of Science (265:1981f). Correlation between the location of a nucleic acid on a physical chromosomal map and a specific disease (or predisposition to a specific disease) may help delimit the region of DNA associated with that genetic disease. The nucleotide sequences of the subject invention may be used to detect differences in gene sequences between normal, carrier or affected individuals.

[0423] 4.20 Preparation of Support Bound Oligonucleotides

[0424] Oligonucleotides, i.e., small nucleic acid segments, may be readily prepared by, for example, directly synthesizing the oligonucleotide by chemical means, as is commonly practiced using an automated oligonucleotide synthesizer.

[0425] Support bound oligonucleotides may be prepared by any of the methods known to those of skill in the art using any suitable support such as glass, polystyrene or Teflon, One strategy is to precisely spot oligonucleotides synthesized by standard synthesizers. Immobilization can be achieved using passive adsorption (Inouye & Hondo, (1990) J. Clin. Microbiol. 28(6), 1469-72); using UV light (Nagata et al., 1985; Dahlen et al., 1987; Morrissey & Collins, (1989) Mol. Cell Probes 3(2) 189-207) or by covalent binding of base modified DNA (Keller et al., 1988; 1989); all references being specifically incorporated herein.

[0426] Another strategy that may be employed is the use of the strong biotin-streptavidin interaction as a linker. For example, Broude et al. (1994) Proc. Natl. Acad. Sci. USA 91(8), 3072-6, describe the use of biotinylated probes, although these are duplex probes, that are immobilized on streptavidin-coated magnetic beads. Streptavidin-coated beads may be purchased from Dynal, Oslo. Of course, this same lining chemistry is applicable to coating any surface with streptavidin. Biotinylated probes may be purchased from various sources, such as, e.g., Operon Technologies (Alameda, Calif.).

[0427] Nunc Laboratories (Naperville, Ill.) is also selling suitable material that could be used. Nunc Laboratories have developed a method by which DNA can be covalently bound to the microwell surface termed Covalink NH. CovaLink NH is a polystyrene surface grafted with secondary amino groups (>NH) that serve as bridgeheads for further covalent coupling. CovaLink Modules may be purchased from Nunc Laboratories. DNA molecules may be bound to CovaLink exclusively at the 5′-end by a phosphoramidate bond, allowing immobilization of more than 1 pmol of DNA (Rasmussen et al., (1991) Anal. Biochem. 198(1) 138-42).

[0428] The use of CovaLink NH strips for covalent binding of DNA molecules at the 5-end has been described (Rasmussen et al., (1991). In this technology, a phosphoramidate bond is employed (Chu et al., (1983) Nucleic Acids Res. 11(8) 6513-29). This is beneficial as immobilization using only a single covalent bond is preferred. The phosphoramidate bond joins the DNA to the CovaLink NH secondary amino groups that are positioned at the end of spacer arms covalently grafted onto the polystyrene surface through a 2 nm long spacer arm. To link an oligonucleotide to CovaLink NH via an phosphoramidate bond, the oligonucleotide terminus must have a 5′ end phosphate group. It is, perhaps, even possible for biotin to be covalently bound to CovaLink and then streptavidin used to bind the probes.

[0429] More specifically, the linkage method includes dissolving DNA in water (7.5 ng/μl) and denaturing for 10 min. at 95° C. and cooling on ice for 10 min. Ice-cold 0.1 M 1-methylimidazole, pH 7.0 (1-MeIm₇), is then added to a final concentration of 10 mM 1-MeIm₇. A ss DNA solution is then dispensed into CovaLink NH strips (75 μl/well) standing on ice.

[0430] Carbodiimide 0.2 M 1-ethyl-3-(3-dimethylaminopropyl)-carbodiimide (EDC), dissolved in 10 mM 1-MeIm₇, is made fresh and 25 μl added per well. The strips are incubated for 5 hours at 50° C. After incubation the strips are washed using, e.g., Nunc-Immuno Wash; first the wells are washed 3 times, then they are soaked with washing solution for 5 min., and finally they are washed 3 times (where in the washing solution is 0.4 N NaOH, 10.25% SDS heated to 50° C.).

[0431] It is contemplated that a further suitable method for use with the present invention is that described in PCT Patent Application WO 90/03382 (Southern & Maskos), incorporated herein by reference. This method of preparing an oligonucleotide bound to a support involves attaching a nucleoside 3′-reagent through the phosphate group by a covalent phosphodiester link to aliphatic hydroxyl groups carried by the support. The oligonucleotide is then synthesized on the supported nucleoside and protecting groups removed from the synthetic oligonucleotide chain under standard conditions that do not cleave the oligonucleotide from the support. Suitable reagents include nucleoside phosphoramidite and nucleoside hydrogen phosphorate.

[0432] An on-chip strategy for the preparation of DNA probe for the preparation of DNA probe arrays may be employed. For example, addressable laser-activated photodeprotection may be employed in the chemical synthesis of oligonucleotides directly on a glass surface, as described by Fodor et al. (1991) Science 251(4995), 767-73, incorporated herein by reference. Probes may also be inmmobilized on nylon supports as described by Van Ness et al. (1991) Nucleic Acids Res., 19(12) 3345-50; or linked to Teflon using the method of Duncan & Cavalier (1988) Anal. Biochem. 169(1), 104-8; all references being specifically incorporated herein.

[0433] To link an oligonucleotide to a nylon support, as described by Van Ness et al. (1991), requires activation of the nylon surface via alkylation and selective activation of the 5′-amine of oligonucleotides with cyanuric chloride.

[0434] One particular way to prepare support bound oligonucleotides is to utilize the light-generated synthesis described by Pease et al., (1994) Proc. Nat'l. Acad. Sci., USA 91(11), 5022-6, incorporated herein by reference). These authors used current photolithographic techniques to generate arrays of immobilized oligonucleotide probes (DNA chips). These methods, in which light is used to direct the synthesis of oligonucleotide probes in high-density, miniaturized arrays, utilize photolabile 5′-protected N-acyl-deoxynucleoside phosphoramidites, surface linker chemistry and versatile combinatorial synthesis strategies. A matrix of 256 spatially defined oligonucleotide probes may be generated in this manner,

[0435] 4.21 Preparation of Nucleic Acid Fragments

[0436] The nucleic acids may be obtained from any appropriate source, such as cDNAs, genomic DNA, chromosomal DNA, microdissected chromosome bands, cosmid or YAC inserts, and RNA, including mRNA without any amplification steps. For example, Sambrook et al. (1989) describes three protocols for the isolation of high molecular weight DNA from mammalian cells (p. 9.14-9.23).

[0437] DNA fragments may be prepared as clones in M13, plasmid or lambda vectors and/or prepared directly from genomic DNA or cDNA by PCR or other amplification methods. Samples may be prepared or dispensed in multiwell plates. About 100-1000 ng of DNA samples may be prepared in 2-500 ml of final volume.

[0438] The nucleic acids would then be fragmented by any of the methods known to those of skill in the art including, for example, using restriction enzymes as described at 9.24-9.28 of Sambrook et al. (1989), shearing by ultrasound and NaOH treatment.

[0439] Low pressure shearing is also appropriate, as described by Schriefer et al. (1990) Nucleic Acids Res. 18(24), 7455-6, incorporated herein by reference). In this method, DNA samples are passed through a small French pressure cell at a variety of low to intermediate pressures. A lever device allows controlled application of low to intermediate pressures to the cell. The results of these studies indicate that low-pressure shearing is a useful alternative to sonic and enzymatic DNA fragmentation methods.

[0440] One particularly suitable way for fragmenting DNA is contemplated to be that using the two base recognition endonuclease, CviJI, described by Fitzgerald et al. (1992) Nucleic Acids Res. 20(14) 3753-62. These authors described an approach for the rapid fragmentation and fractionation of DNA into particular sizes that they contemplated to be suitable for shotgun cloning and sequencing.

[0441] The restriction endonuclease CviJI normally cleaves the recognition sequence PuGCPy between the G and C to leave blunt ends. Atypical reaction conditions, which alter the specificity of this enzyme (CviJI**), yield a quasi-random distribution of DNA fragments form the small molecule pUC19 (2688 base pairs). Fitzgerald et al. (1992) quantitatively evaluated the randomness of this fragmentation strategy, using a CviJI** digest of pUC19 that was size fractionated by a rapid gel filtration method and directly ligated, without end repair, to a lac Z minus M13 cloning vector. Sequence analysis of 76 clones showed that CviJI** restricts pyGCPy and PuGCPu, in addition to PuGCPy sites, and that new sequence data is accumulated at a rate consistent with random fragmentation.

[0442] As reported in the literature, advantages of this approach compared to sonication and agarose gel fractionation include: smaller amounts of DNA are required (0.2-0.5 μg instead of 2-5 μg); and fewer steps are involved (no preligation, end repair, chemical extraction, or agarose gel electrophoresis and elution are needed).

[0443] Irrespective of the manner in which the nucleic acid fragments are obtained or prepared, it is important to denature the DNA to give single stranded pieces available for hybridization. This is achieved by incubating the DNA solution for 2-5 minutes at 80-90° C. The solution is then cooled quickly to 2° C. to prevent renaturation of the DNA fragments before they are contacted with the chip. Phosphate groups must also be removed from genomic DNA by methods known in the art.

[0444] 4.22 Preparation Of DNA Arrays

[0445] Arrays may be prepared by spotting DNA samples on a support such as a nylon membrane. Spotting may be performed by using arrays of metal pins (the positions of which correspond to an array of wells in a microtiter plate) to repeated by transfer of about 20 nl of a DNA solution to a nylon membrane. By offset printing, a density of dots higher than the density of the wells is achieved. One to 25 dots may be accommodated in 1 mm², depending on the type of label used. By avoiding spotting in some preselected number of rows and columns, separate subsets (subarrays) may be formed. Samples in one subarray may be the same genomic segment of DNA (or the same gene) from different individuals, or may be different, overlapped genomic clones. Each of the subarrays may represent replica spotting of the same samples. In one example, a selected gene segment may be amplified from 64 patients. For each patient, the amplified gene segment may be in one 96-well plate (all 96 wells containing the same sample). A plate for each of the 64 patients is prepared. By using a 96-pin device, all samples may be spotted on one 8×12 cm membrane. Subarrays may contain 64 samples, one from each patient. Where the 96 subarrays are identical, the dot span may be 1 mm² and there may be a 1 mm space between subarrays.

[0446] Another approach is to use membranes or plates (available from NUNC, Naperville, Ill.) which may be partitioned by physical spacers e.g. a plastic grid molded over the membrane, the grid being similar to the sort of membrane applied to the bottom of multiwell plates, or hydrophobic strips. A fixed physical spacer is not preferred for imaging by exposure to flat phosphor-storage screens or x-ray films.

[0447] The present invention is illustrated in the following examples. Upon consideration of the present disclosure, one of skill in the art will appreciate that many other embodiments and variations may be made in the scope of the present invention. Accordingly, it is intended that the broader aspects of the present invention not be limited to the disclosure of the following examples. The present invention is not to be limited in scope by the exemplified embodiments which are intended as illustrations of single aspects of the invention, and compositions and methods which are functionally equivalent are within the scope of the invention. Indeed, numerous modifications and variations in the practice of the invention are expected to occur to those skilled in the art upon consideration of the present preferred embodiments. Consequently, the only limitations which should be placed upon the scope of the invention are those which appear in the appended claims.

[0448] All references cited within the body of the instant specification are hereby incorporated by reference in their entirety.

### 5.0 EXAMPLES

### 5.1 Example 1

[0449] Novel Nucleic Acid Sequences Obtained From Various Libraries

[0450] A plurality of novel nucleic acids were obtained from cDNA libraries prepared from various human tissues and in some cases isolated from a genomic library derived from human chromosome using standard PCR, SBH sequence signature analysis and Sanger sequencing techniques. The inserts of the library were amplified with PCR using primers specific for the vector sequences which flank the inserts. Clones from cDNA libraries were spotted on nylon membrane filters and screened with oligonucleotide probes (e.g., 7-mers) to obtain signature sequences. The clones were clustered into groups of similar or identical sequences. Representative clones were selected for sequencing.

[0451] In some cases, the 5′ sequence of the amplified inserts was then deduced using a typical Sanger sequencing protocol. PCR products were purified and subjected to fluorescent dye terminator cycle sequencing. Single pass gel sequencing was done using a 377 Applied Biosystems (ABI) sequencer to obtain the novel nucleic acid sequences.

### 5.2 Example 2

[0452] Assemblage of Novel Nucleic Acids

[0453] The contigs or nucleic acids of the present invention, designated as SEQ ID NO: 489-706 were assembled using an EST sequence as a seed. Then a recursive algorithm was used to extend the seed EST into an extended assemblage, by pulling additional sequences from different databases (i.e., Hyseq's database containing EST sequences, dbEST, gb pri, and UniGene, and exons from public domain genomic sequences predicated by GenScan) that belong to this assemblage. The algorithm terminated when there were no additional sequences from the above databases that would extend the assemblage. Further, inclusion of component sequences into the assemblage was based on a BLASTN hit to the extending assemblage with BLAST score greater than 300 and percent identity greater than 95%.

[0454] Table 8 sets forth the novel predicted polypeptides (including proteins) encoded by the novel polynucleotides (SEQ ID NO: 489-706) of the present invention, and their corresponding translation start and stop nucleotide locations to each of SEQ ID NO: 489-706. Table 8 also indicates the method by which the polypeptide was predicted. Method A refers to a polypeptide obtained by using a software program called FASTY (available from http://fasta.bioch.virginia.edu) which selects a polypeptide based on a comparison of the translated novel polynucleotide to known polynucleotides (W.R. Pearson, Methods in Enzymology, 183:63-98 (1990), herein incorporated by reference). Method B refers to a polypeptide obtained by using a software program called GenScan for human/vertebrate sequences (available from Stanford University, Office of Technology Licensing) that predicts the polypeptide based on a probabilistic model of gene structure/compositional properties (C. Burge and S. Karlin, J. Mol. Biol., 268:78-94 (1997), incorporated herein by reference). Method C refers to a polypeptide obtained by using a Hyseq proprietary software program that translates the novel polynucleotide and its complementary strand into six possible amino acid sequences (forward and reverse frames) and chooses the polypeptide with the longest open reading frame.

### 5.3 Example 3

[0455] Novel Nucleic Acids

[0456] The novel nucleic acids of the present invention were assembled from sequences that were obtained from a cDNA library by methods described in Example 1 above, and in some cases sequences obtained from one or more public databases. The nucleic acids were assembled using an EST sequence as a seed. Then a recursive algorithm was used to extend the seed EST into an extended assemblage, by pulling additional sequences from different databases (Flyseq's database containing EST sequences, dbEST, gb pri, and UniGene) that belong to this assemblage. The algorithm terminated when there was no additional sequences from the above databases that would extend the assemblage. Inclusion of component sequences into the assemblage was based on a BLASTN hit to the extending assemblage with BLAST score greater than 300 and percent identity greater than 95%. Using PURAP (Univ. of Washington) or CAP4 (Paracel), a full-length gene cDNA sequence and its corresponding protein sequence were generated from the assemblage. Any frame shifts and incorrect stop codons were corrected by hand editing. During editing, the sequences were checked using FASTY and/or BLAST against Genebank (i.e., dbEST, gb pri, UniGene, and Genpept) and the Geneseq (Derwent). Other computer programs which may have been used in the editing process were phredPhrap and Consed (University of Washington) and ed-ready, ed-ext and cg-zip-2 (Hyseq, Inc.). The full-length nucleotide and amino acid sequences, including splice variants resulting from these procedures are shown in the Sequence Listing as SEQ ID NO: 1-488.

[0457] SEQ ID NO: 1-132 were classified as secreted according to their predicted cellular localization using the Pfam software program (Sonnhammer et al., Nucleic Acids Res., Vol. 26(1) pp. 320-322 (1998), and http://pfam.wstl.edu/, herein incorporated by reference).

[0458] SEQ ID NO: 133-197 were determined to contain signal peptide sequences and their cleavage sites using Neural Network SignalP V1.1 program (from Center for Biological Sequence Analysis, The Technical University of Denmark). The process for identifying prokaryotic and eukaryotic signal peptides and their cleavage sites are also disclosed by Henrik Nielson, Jacob Engelbrecht, Soren Brunak, and Gunnar von Heijne in the publication “Identification of prokaryotic and eukaryotic signal peptides and prediction of their cleavage sites” Protein Engineering, Vol. 10, no. 1, pp. 1-6 (1997), incorporated herein by reference. A maximum S score and a mean S score, as described in the Nielson et al reference, was obtained for the polypeptide sequences.

[0459] SEQ ID NO: 198-244 were determined to be secreted polypeptides using a proprietary algorithm, SeqLoc™ (Hyseq Inc.). SeqLoc™ classifies the proteins into three sets of locales: intracellular, membrane, or secreted. This prediction is calculated using maximum likelihood estimation of three characteristics of each polypeptide, 1) percentage of cysteine residues, 2) Kyte-Doolittle scores for the first 20 amino acids of each protein (J. Mol Biol, 157, pp. 105-31 (1982), incorporated herein by reference), and 3) Kyte-Doolittle scores to calculate the longest hydrophobic stretch (LHS) of the said protein (J. Mol Biol, 157, pp. 105-31 (1982), incorporated herein by reference). The LHS is calculated by finding the stretch of 20 amino acid residues in the protein that have the highest sum of Kyte-Doolittle hydrophobicity values.

[0460] Table 1 shows the various tissue sources of SEQ ID NO: 1-244.

[0461] The homologs for polypeptides SEQ ID NO: 245-488, that correspond to nucleotide sequences SEQ ID NO: 1-244 were obtained by a BLASTP version 2.0al 19 MP-WashU searches against Genpept release 124 and the Geneseq release 200112 (Derwent) using BLAST algorithm. The results showing homologues for SEQ ID NO: 245-488 from Genpept 124 and Geneseq are shown in Table 2.

[0462] Using eMatrix software package (Stanford University, Stanford, Calif.) (Wu et al., J. Comp. Biol., Vol. 6, 219-235 (1999), http://motif.stanford.edu/ematrix-search/herein incorporated by reference), all the polypeptide sequences were examined to determine whether they had identifiable signature regions. Scoring matrices of the eMatrix software package are derived from the BLOCKS, PRINTS, PFAM, PRODOM, and DOMO databases. Table 3 shows the accession number of the homologous eMatrix signature found in the indicated polypeptide sequence, its description, and the results obtained which include accession number subtype; raw score; p-value; and the position of signature in amino acid sequence.

[0463] Using the Pfam software program (Sonnhammer et al., Nucleic Acids Res., Vol. 26(1) pp. 320-322 (1998) herein incorporated by reference) all the polypeptide sequences were examined for domains with homology to certain peptide domains. Table 4 shows the name of the Pfam model found, the description, the e-value and the Pfam score for the identified model within the sequence. Further description of the Pfam models can be found at http://pfam.wustl.edu/.

[0464] The GeneAtlas™ software package (Molecular Simulations Inc. (MSI), San Diego, Calif.) was used to predict the three-dimensional structure models for the polypeptides encoded by SEQ ID NO 1-244 (i.e. SEQ ID NO: 245-488). Models were generated by (1) PSI-BLAST which is a multiple alignment sequence profile-based searching developed by Altschul et al, (Nucl. Acids. Res. 25, 3389-3408 (1997)), (2) High Throughput Modeling (HTM) (Molecular Simulations Inc. (MSI) San Diego, Calif.,) which is an automated sequence and structure searching procedure (http://www.msi.com/, and (3) SeqFold™ which is a fold recognition method described by Fischer and Eisenberg (J. Mol. Biol. 209, 779-791 (1998)). This analysis was carried out, in part, by comparing the polypeptides of the invention with the known NM (nuclear magnetic resonance) and x-ray crystal three-dimensional structures as templates. Table 5 shows: “PDB ID”, the Protein DataBase (PDB) identifier given to template structure; “Chain ID”, identifier of the subcomponent of the PDB template structure; “Compound Information”, information of the PDB template structure and/or its subcomponents; “PDB Function Annotation” gives function of the PDB template as annotated by the PDB files (http:/www.rcsb.org/PDB/); start and end amino acid position of the protein sequence aligned; PSI-BLAST score, the verify score, the SeqFold score, and the Potential(s) of Mean Force (PMF). The verify score is produced by GeneAtlas™ software (MSI), is based on Dr. Eisenberg's Profile-3D threading program developed in Dr. David Eisenberg's laboratory (U.S. Pat. No. 5,436,850 and Luthy, Bowie, and Eisenberg, Nature, 356:83-85 (1992)) and a publication by R. Sanchez and A. Sali, Proc. Natl. Acad. Sci. USA, 95:13597-12502. The verify score produced by GeneAtlas normalizes the verify score for proteins with different lengths so that a unified cutoff can be used to select good models as follows:

[0465] Verify score (normalized)=(raw score−½ high score)/(½ high score)

[0466] The PFM score, produced by GeneAtlas™ software (MSI), is a composite scoring function that depends in part on the compactness of the model, sequence identity in the alignment used to build the model, pairwise and surface mean force potentials (WP). As given in table 5, a verify score between 0 to 1.0, with 1 being the best, represents a good model. Similarly, a PMF score between 0 to 1.0, with 1 being the best, represents a good model. A SeqFold score of more than 50 is considered significant. A good model may also be determined by one of skill in the art based all the information in Table 5 taken in totality.

[0467] Table 6 shows the position of the signal peptide in each of the polypeptides and the maximum score and mean score associated with that signal peptide using Neural Network SignalP V1.1 program (from Center for Biological Sequence Analysis, The Technical University of Denmark). The process for identifying prokaryotic and eukaryotic signal peptides and their cleavage sites are also disclosed by Henrik Nielson, Jacob Engelbrecht, Soren Brunak, and Gunnar von Heijne in the publication “Identification of prokaryotic and eukaryotic signal peptides and prediction of their cleavage sites” Protein Engineering, Vol. 10, no. 1, pp. 1-6 (1997), incorporated herein by reference. A maximum S score and a mean S score, as described in the Nielson et al reference, was obtained for the polypeptide sequences.

[0468] Table 7 correlates SEQ ID NO: 1-244 to a specific chromosomal location.

[0469] Table 9 is a correlation table of the novel polynucleotide sequences SEQ ID NO: 1-244, their corresponding polypeptide sequences SEQ ID NO: 245-488, their corresponding priority contig nucleotide sequences SEQ ID NO: 489-706, their corresponding priority contig polypeptide sequences SEQ ID NO: 707-924, and the US serial number of the priority application in which the contig sequence was filed.

TABLE 1

| | RNA | Library | |
|---|---|---|---|
| Tissue Origin | Source | Name | SEQ ID NO: |
| adult brain | GIBCO | AB3001 | 1 5 7 13 34 90 99 127 151 207 224 239 |
| adult brain | GIBCO | ABD003 | 1 8 11 13 43 55 62 64 75 81 84-85 102 127 129-131 133 144 146-147 |
| | | | 151-152 186 189 197 200-201 207-208 210 225 241 |
| adult brain | Clontech | ABR001 | 13 22 64 66 102 112 182 186 206 211 238 |
| adult brain | Clontech | ABR006 | 1-5 18 22 24 36-39 47 52 55-56 60-61 93-94 98 106 112 125 128 133 |
| | | | 143 145 147 151 157 162 165 179 182 184 189-191 235 238-239 |
| adult brain | Clontech | ABR008 | 1-2 4 7-8 11 13-14 22 24 27 35-40 42 48-49 56-57 59 61 64 67 70 73 |
| | | | 78-82 92 95 98-99 102 104-105 108 112 115 119 121 123 126-130 |
| | | | 133 140-143 147 150 153 157 159 162 165 171 176 180-182 189-190 |
| | | | 195-197 212 222 225-227 231 236-237 241 |
| adult brain | BioChain | ABR013 | 183 |
| adult brain | Invitrogen | ABR014 | 140 176 189 |
| adult brain | Invitrogen | ABR015 | 133 136 208 241 |
| adult brain | Invitrogen | ABR016 | 8 13 186 |
| adult brain | Invitrogen | ABT004 | 11 42 48 60 85 129 133 141-142 147 149 |
| cultured | Stratagene | ADP001 | 10 25 42-43 48 75 81 91 122 130 140 144 163 178 186 205 241 |
| preadipocytes | | | |
| adrenal gland | Clontech | ADR002 | 4 7 9 13 24-26 31 33 42-43 56 60 71 84-85 94 98 100-101 118 127 |
| | | | 133-134 141-144 163 182 189 199 201 207 212 |
| adult heart | GIBCO | AHR001 | 1 4 6-8 13 21 23-24 42-43 45 53-54 60-61 67 70 72 81 90-91 98-99 |
| | | | 102 115 120 130 133 137-140 143-144 146 166-169 178-179 183 |
| | | | 186 189 197 204 207 213 224-225 |
| adult kidney | GIBCO | AKD001 | 4 6 8 12-13 20 23-26 34 39-43 53-54 62 64 66 73 79 81 90 98 102 |
| | | | 108 123 127 130 133 135 144-148 163 171-172 179 186 189 197 200 |
| | | | 204 206-207 210 213 224-225 227 233 241-242 |
| adult kidney | Invitrogen | AKT002 | 6 12-13 24 39 42-43 51 60 66 86 93 102 125 132 143 146-148 156 |
| | | | 178 184 186 189 197 200 202 210 219 225 233 |
| adult lung | GIBCO | ALG001 | 25-26 41 48 60 74 81 146 178 189 197 |
| lymph node | Clontech | ALN001 | 8 13 18 25 35-38 |
| young liver | GIBCO | ALV001 | 1 24 27 48 73 85 136 173-175 178-179 189 196-197 201 |
| adult liver | Invitrogen | ALV002 | 4-5 12-13 32 39 42 48 51 56 73 81 98 102 120 133 136 140 143-144 |
| | | | 163 165 173-175 178-179 182 189 193 225 231 241 |
| adult liver | Clontech | ALV003 | 36-38 51 73 135-136 165 173-175 224 |
| adult ovary | Invitrogen | AOV001 | 4 7 9 12-14 20-21 23-26 31 34 39-40 42-43 48 52 60 62 64 73 75 78-79 |
| | | | 81 94 96 98 112 118-119 122-123 127 130 133 135 140 144 146-147 |
| | | | 149 153 163 172 178 182 186 193 195 202 206-207 209 213 222 |
| | | | 224 231 233 236 239-240 242 |
| adult placenta | Clontech | APL001 | 43 73 178 |
| placenta | Invitrogen | APL002 | 41 75 224 |
| adult spleen | GIBCO | ASP001 | 4 8 13 23-24 27 41 48 64 75 81 102 104 124 141-144 146 189 201 |
| | | | 224 |
| adult testis | GIBCO | ATS001 | 10 13 34 43 46 60 81 102 123 143-144 155 183 189 200 206 224 |
| Genomic | Research | BAC002 | 80 |
| DNA-from- | Genetics | | |
| BAC-393I6 | (CITB | | |
| | BAC | | |
| | library) | | |
| Genomic | Genomic | BAC003 | 80 |
| DNA-from- | DNA from | | |
| BAC-393I6 | Genetic | | |
| | Research | | |
| adult bladder | Invitrogen | BLD001 | 8 12-13 25 71 122-123 129 134 140 144 178 181 184 241-242 |
| bone marrow | Clontech | BMD001 | 1-2 7 12 14 17-19 23 26 46-47 63-64 81 91 102 106 118 122 124 133 |
| | | | 144 146 186 189 198-203 205 207 224-225 236 |
| bone marrow | Clontech | BMD002 | 1-2 11-12 14 19 28-29 36-38 40-41 43 48-49 59-61 71 73 76 90 93 |
| | | | 95 97-98 104 115 118 120 122 125 130 134 143 162-163 171 186 |
| | | | 189 197 202 206-207 212 225 240-241 243 |
| bone marrow | Clontech | BMD007 | 11 |
| adult colon | Invitrogen | CLN001 | 13 71 75 93 122 129 134 141-142 224 241 |
| mixture of | various | CTL016 | 71 122 207 |
| 16 tissues- | vendors | | |
| mRNAs* | | | |
| mixture of | various | CTL021 | 189 |
| 16 tissues- | vendors | | |
| mRNAs* | | | |
| adult cervix | BioChain | CVX001 | 1 7 12 14 21 24 26-27 35 43 51 60 62 64 71 84 95 98-99 122-123 |
| | | | 127 129-130 140-142 144 146 176 178 186 195 197 200-201 206 |
| | | | 211-213 220 222 240 |
| endothelial | Stratagene | EDT001 | 1 4 7-8 10-11 13 19-20 23 25 30-31 48 62 64 66 75 78 81 90-91 93 |
| cells | | | 95 98 118 133 137-139 144-146 150 156 178 186 197 200 206-207 |
| | | | 209 213 215 224 230 241 |
| fetal brain | Clontech | FBR001 | 35 53-54 129 182 |
| fetal brain | Clontech | FBR004 | 36-38 70 94 126 171 187 231 238 |
| fetal brain | Clontech | FBR006 | 1-2 5 7 13 15 24 32 35-39 42 56-57 62 67 73 79 83 90 92 98 112 114 |
| | | | 117 119 123 127 129 135 140-143 150 155 157-158 162 171-172 |
| | | | 176 180-182 190 192 212 218 220 222 228 230-231 236-237 241-243 |
| fetal brain | Invitrogen | FBT002 | 9 34 36-38 81 102 127 147 197 207 |
| fetal heart | Invitrogen | FHR001 | 4 7-8 10 13-14 21 23 27 34 36-38 43 48 60-61 73 78-79 98-101 104 |
| | | | 120 122 126-127 129 133 143-144 155 160 163 185-186 197 202 |
| | | | 217-218 225 231 |
| fetal kidney | Clontech | FKD001 | 6 23 66 81 146 |
| fetal kidney | Clontech | FKD002 | 19 26 42 60 78-79 92 102 127-130 140 143 182 186 189 202 212 220 |
| fetal kidney | Invitrogen | FKD007 | 122 189 |
| fetal lung | Clontech | FLG001 | 6 8 32 35 62 122 129 197 211 215 |
| fetal lung | Invitrogen | FLG003 | 10 39-40 69 83 98 102 126 135 178 183 189 199 202 224 242 |
| fetal liver- | Columbia | FLS001 | 1-13 17 20-21 23 25 30 39 41-43 48 61 63-64 75-76 79 85 90 95 98-99 |
| spleen | University | | 102 108 115 120 127 130 133-144 146-147 154 173-175 178-179 |
| | | | 182 185 187 189 196-197 201-203 205 210 212 218 224-226 241 |
| fetal liver- | Columbia | FLS002 | 1 4-5 8 11 13 17-18 20-25 32 39 41-42 48 51 56 63-64 79 90-91 95 |
| spleen | University | | 98 102 118 130 136 143-144 146 171 173-175 178-179 182 185-187 |
| | | | 193 197 203 214 218 225-226 230 238 243 |
| fetal liver- | Columbia | FLS003 | 1 3 9 13 21 43 50 61 66 90 95 98 115 122 130 136 173-175 187-188 |
| spleen | University | | 196 202-203 218 225 241 |
| fetal liver | Invitrogen | FLV001 | 23 31 42 70 75 122 133 140 172-175 178-179 205 |
| fetal liver | Clontech | FLV002 | 2 11 42 133 173-175 180 224 226 |
| fetal liver | Clontech | FLV004 | 2 11 35-38 40 48 98 118 127 133 136 148 162 173-175 179 182 186 |
| | | | 189 196-197 202 225 |
| fetal muscle | Invitrogen | FMS001 | 4 8 10 21 27 33 49 102 122 130 133 164 166-169 192 244 |
| fetal muscle | Invitrogen | FMS002 | 7-8 10 13 23 26 33 42 49 61-62 76 86 98 118 122 124 129-130 140-142 |
| | | | 164 166-169 192 204 207 244 |
| fetal skin | Invitrogen | FSK001 | 1 4 9-10 12-13 27 36-38 48 50 61-62 64 71 73-75 80-81 87-91 94 99 |
| | | | 107 122 130 132-134 140-142 156 163 166-170 172 178-179 181 |
| | | | 184 189 196-197 202 212 214 221 227 231 238 241 |
| fetal skin | Invitrogen | FSK002 | 10 14 22-23 25 39 48 88-91 98 100-101 104 106 108 115 117-118 |
| | | | 120 122 124 130 133 160 176 180 182 186 197 207 225 232 242 |
| umbilical cord | BioChain | FUC001 | 6 12 18 32 36-38 40 61 70-71 75 84 94-95 98-99 118 122 127 140 |
| | | | 144 156 163 180 184 189 205 210 215 241 |
| fetal brain | GIBCO | HFB001 | 1 4 11-13 15 24 26 30 32 42-44 46 48 64 81 90 94 112 125 130 133 |
| | | | 135 140 143 151 155 162 189 197 200-201 206-208 210 227 241 |
| macrophage | Invitrogen | HMP001 | 1 12 25 140 144 181 194 197 |
| infant brain | Columbia | IB2002 | 4 9-10 15 22-23 33 43 48-49 55 63 67 73 75 81 85 90 99 102 120 |
| | University | | 122 124 135-136 141-142 145-148 151 155 157-158 162 171 182 |
| | | | 189 197 200 206-207 224-225 233 238-239 |
| infant brain | Columbia | IB2003 | 7 10 12 22 47 49 53-54 61 75 84-85 90 94-95 102 122 133 135 141-142 |
| | University | | 147 176 189 204 207 231 239 241 |
| infant brain | Columbia | IBM002 | 12 157-158 224 |
| | University | | |
| infant brain | Columbia | IBS001 | 6 10 33 108 135 233 |
| | University | | |
| lung, | Stratagene | LFB001 | 1 4 8 12-13 30 66 81 117 133 140 144 211 215 238 |
| fibroblast | | | |
| lung tumor | Invitrogen | LGT002 | 1 3-4 12 15 39 42-43 48 50-51 62-63 66 69 75 81 83-84 95 102 116 |
| | | | 123 125 137-139 144 146 178-179 181 185 189 195-197 204 209-212 |
| | | | 216 218 222 224-225 227 231 238 240-242 |
| lymphocytes | ATCC | LPC001 | 4 14 21 25-27 35 46 48 53-54 66 68-69 75 81 88-89 102 104 110 118 |
| | | | 122 129-130 133 145 171 176-177 189 195-196 201 207 212 225-226 |
| leukocyte | GIBCO | LUC001 | 1-2 4 7-8 12-14 17 21-22 25-29 36-38 43 50 61 63-64 71 75 81 88-90 |
| | | | 94 98 102 104 118 120 127 130 134 140 146-147 170 186 189 195 |
| | | | 197 200-201 205-207 224-225 233 240 |
| leukocyte | Clontech | LUC003 | 14 27 81 146 197 201 204 242 |
| melanoma | Clontech | MEL004 | 4 52 81 130 133 143 146 186 194 196 200 212 218 |
| from cell line | | | |
| ATCC #CRL | | | |
| 1424 | | | |
| mammary | Invitrogen | MMG001 | 4 6 9 12-13 25 27 31 33-34 36-39 42 48 51 53-56 60-62 70 72 75 81 |
| gland | | | 85 88-89 94-95 102 119 122 127 129 131-133 140 144 146 156 163 |
| | | | 172 176 178-179 181 185 189 192 205-206 210 218 224 231 236 238 |
| | | | 240-243 |
| induced | Stratagene | NTD001 | 1 22 30 32 42 84 117 125 144 206 222 |
| neuron-cells | | | |
| retinoic acid- | Stratagene | NTR001 | 1 3 34 104 124 129 140 225 241 |
| induced- | | | |
| neuronal-cells | | | |
| neuronal cells | Stratagene | NTU001 | 3-4 15 60 63 75 120 122 133 140 171 181 196 206 210 |
| pituitary gland | Clontech | PIT004 | 13 20 33 43 66 74 90 123 130 217 |
| placenta | Clontech | PLA003 | 4-5 7 25 36-39 56 93 100-101 103-104 120 122 134 186-187 189 231 |
| prostate | Clontech | PRT001 | 20 26 34 62 72 81 143 166-169 178-179 197 202 218 241 |
| rectum | Invitrogen | REC001 | 3 25 33 51 74 88-89 122 129 133 155 189 197 224 241 243 |
| salivary gland | Clontech | SAL001 | 1 18 34 69 71 120 179 204 214 235-236 |
| salivary gland | Clontech | SALs03 | 179 |
| small intestine | Clontech | SIN001 | 1 4 7-8 10 12 20-22 26 32 36-38 43 48 51 61 68 71 75 86 91-92 96-99 |
| | | | 118 122 124-125 130 133-134 140 143-144 148 160 185 189 196 |
| | | | 201 210 212 224 229 234 241 |
| skeletal | Clontech | SKM001 | 7 42 49 73 75 102 130 143 223 |
| muscle | | | |
| spinal cord | Clontech | SPC001 | 2 8 13 24 26 35 43 63-64 127-128 130 135 156 178 185 189 196 206 |
| | | | 210 |
| adult spleen | Clontech | SPLc01 | 7-8 14 36-38 53-54 59 71 92 104 108 125 129 133 140-142 162 237 |
| stomach | Clontech | STO001 | 32 99 143 161 172 189 |
| thalamus | Clontech | THA002 | 7 10-11 60 79 98 127 131 136 143 153 183 186 190 206-207 212 227 |
| thymus | Clontech | THM001 | 1 14 26 30 46 50 74 79 98 115 118 130 154 196-197 217 222 224 |
| | | | 233 |
| thymus | Clontech | THMc02 | 1-2 4 10 13 24-25 30 32 36-39 48 61 64-65 73-74 76-77 79 82 88-89 |
| | | | 100-101 105-106 115 118 120 122 127 130 133 140 146 171 183 185 |
| | | | 199 202 206 224-225 231 237 242 |
| thyroid gland | Clontech | THR001 | 1 4-5 7-8 20-21 24 26 31 43 49 53-54 64 66 70 73 75 81 90 92 98 |
| | | | 110 120 124 130 133 140 143-144 162-163 172 189 197 199 201 |
| | | | 206-208 212-213 219-220 224 236 238 241-242 |
| trachea | Clontech | TRC001 | 4-5 40 48 62 111 144 146 179 200 226 |
| uterus | Clontech | UTR001 | 10 12-13 21 71 130 134 140 144 208 210 213 218 |
| *The 16 tissue-mRNAs and their vendor source, are as follows: 1) Normal adult brain mRNA (Invitrogen), | | | |
| # 2) normal adult kidney mRNA (Invitrogen), 3) normal adult liver mRNA (Invitrogen), 4) normal fetal brain | | | |
| # mRNA (Invitrogen), 5) normal fetal kidney mRNA (Invitrogen), 6) normal fetal liver mRNA (Invitrogen), | | | |
| # 7) normal fetal skin mRNA (Invitrogen), 8) human adrenal gland mRNA (Clontech), 9) human bone marrow | | | |
| # mRNA (Clontech), 10) human leukemia lymphablastic mRNA (Clontech), 11) human thymus mRNA (Clontech), | | | |
| # 12) human lymph node mRNA (Clontech), 13) human spinal cord mRNA (Clontech), 14) human thyroid mRNA (Clontech), | | | |
| # 15) human esophagus mRNA (BioChain), 16) human conceptional umbilical cord mRNA (BioChain). | | | |

[0470] TABLE 2

| SEQ | | | | | |
|---|---|---|---|---|---|
| ID | Accession | | | | |
| NO: | Number | Species | Description | Score | % identity |
| 245 | W78199 | Homo sapiens | Human secreted protein encoded by gene 74 clone | 2952 | 99 |
| | | | HGBAC11. | | |
| 245 | gi11139753 | Homo sapiens | bA48B24.1 (A novel protein containing a formin | 2809 | 99 |
| | | | binding protein (FBP28) domain) | | |
| 245 | W85610 | Homo sapiens | Secreted protein clone eh80_1. | 1678 | 98 |
| 246 | gi1213539 | Caenorhabditis | coded for by C. elegans cDNA CEMSG95FB; | 208 | 34 |
| | | elegans | coded for by C. elegans cDNA CEMSG95RB; | | |
| | | | coded for by C. elegans cDNA CEMSG95RC; | | |
| | | | coded for by C. elegans cDNA yk9h1.3; coded for | | |
| | | | by C. elegans cDNA yk9h1.5; coded for by C. | | |
| | | | elegans cDNA yk42a10.5; coded for by C. elegans | | |
| | | | cDNA yk91f4.5; coded for by C. elegans cDNA | | |
| | | | yk127h3.5; coded for by C. elegans cDNA | | |
| | | | yk91f4.3; Similar to ubiquitin conjugating | | |
| | | | enzyme; recoverin subfamily of EF-hand calcium | | |
| | | | binding protein | | |
| 246 | gi8650530 | Naegleria | calcineurin B | 160 | 30 |
| | | fowleri | | | |
| 246 | Y69996 | Homo sapiens | Human receptor-associated protein from Incyte | 154 | 30 |
| | | | clone 2132846. | | |
| 247 | gi7332056 | Caenorhabditis | contains similarity to Pfam family PF00078 | 228 | 22 |
| | | elegans | (Reverse transcriptase (RNA-dependent)), | | |
| | | | score = 79.6, E = 6.3e−20, E = 1 | | |
| 247 | gi1572721 | Homo sapiens | megakaryocyte stimulating factor; MSF | 230 | 21 |
| 247 | B29773 | Homo sapiens | Human megakaryocyte stimulating factor (MSF), | 230 | 21 |
| | | | SEQ ID NO: 1. | | |
| 248 | gi11967711 | Homo sapiens | Tsg24 protein | 10136 | 99 |
| 248 | gi642252 | Mus musculus | tsg24 | 9437 | 92 |
| 248 | gi10178133 | Arabidopsis | meiotic check point regulator-like protein | 1243 | 35 |
| | | thaliana | | | |
| 249 | gi156297 | Caenorhabditis | putative | 656 | 39 |
| | | elegans | | | |
| 249 | gi2624972 | Mus musculus | proline-rich protein 48 | 672 | 49 |
| 249 | gi6523547 | Volvox carteri | hydroxyproline-rich glycoprotein DZ-HRGP | 589 | 39 |
| | | f. nagariensis | | | |
| 250 | gi10334640 | Homo sapiens | bA425A6.1 (frizzled (Drosophila) homolog 8) | 3785 | 100 |
| 250 | gi1151260 | Mus musculus | transmembrane receptor | 3539 | 95 |
| 250 | gi4164471 | Danio rerio | frizzled 8a protein | 1139 | 82 |
| 251 | gi10176983 | Arabidopsis | GTP-binding membrane protein LepA homolog | 1836 | 58 |
| | | thaliana | | | |
| 251 | gi3004655 | Drosophila | waclaw | 1558 | 51 |
| | | melanogaster | | | |
| 251 | gi2984041 | Aquifex | G-protein LepA | 1656 | 52 |
| | | aeolicus | | | |
| 252 | gi2460318 | Homo sapiens | RNA-binding protein regulatory subunit | 505 | 92 |
| 252 | gi5731801 | Homo sapiens | bk215D11.1 (RNA-binding protein regulatory | 505 | 92 |
| | | | subunit) | | |
| 252 | gi1780755 | Homo sapiens | DJ-1 protein | 505 | 92 |
| 253 | gi3883070 | Yersinia pestis | putative endonuclease | 190 | 34 |
| 253 | gi4154837 | Helicobacter | putative ENDONUCLEASE | 174 | 28 |
| | | pylori J99 | | | |
| 253 | gi2313422 | Helicobacter | membrane bound endonuclease (nuc) | 172 | 30 |
| | | pylori 26695 | | | |
| 254 | gi1407657 | Mus musculus | endophilin II | 1377 | 94 |
| 254 | gi1869810 | Homo sapiens | SH3-containing Grb-2-like 1 | 1445 | 100 |
| 254 | gi6120106 | Homo sapiens | SH3-containing protein EEN | 1445 | 100 |
| 255 | gi437365 | Homo sapiens | AD amyloid | 579 | 86 |
| 255 | gi11118352 | Homo sapiens | SNCA isoform NACP140 | 579 | 86 |
| 255 | R70127 | Homo sapiens | Precursor of novel amyloid component (NACP). | 579 | 86 |
| 256 | gi6433901 | Homo sapiens | Graf protein | 1681 | 55 |
| 256 | W97809 | Homo sapiens | Human GTPase regulator GRAF. | 1681 | 55 |
| 256 | gi5081652 | Homo sapiens | oligophrenin-1 like protein | 1461 | 53 |
| 257 | gi2460318 | Homo sapiens | RNA-binding protein regulatory subunit | 632 | 100 |
| 257 | gi5731801 | Homo sapiens | bK215D11.1 (RNA-binding protein regulatory | 632 | 100 |
| | | | subunit) | | |
| 257 | gi1780755 | Homo sapiens | DJ-1 protein | 624 | 99 |
| 258 | gi5020264 | Mus musculus | Cdc42 GTPase-activating protein | 927 | 49 |
| 258 | gi2477513 | Homo sapiens | F25965_3 | 678 | 50 |
| 258 | gi7271811 | Drosophila | GTPase activating protein | 580 | 53 |
| | | melanogaster | | | |
| 259 | gi12005724 | Homo sapiens | mixed lineage kinase MLK1 | 5618 | 100 |
| 259 | gi971420 | Homo sapiens | mixed lineage kinase 2 | 1941 | 61 |
| 259 | gi758593 | Homo sapiens | serine/threonine kinase with SH3 domain, leucine | 1939 | 61 |
| | | | zipper domain and proline rich domain | | |
| 260 | gi551608 | Homo sapiens | receptor protein-tyrosine kinase | 4490 | 100 |
| 260 | R85092 | Homo sapiens | EPH-like receptor protein tyrosine kinase HEK11. | 4490 | 100 |
| 260 | gi755568 | Rattus | Ehk-3, full length form | 4449 | 98 |
| | | norvegicus | | | |
| 261 | gi181176 | Homo sapiens | connective tissue activating peptide III | 618 | 96 |
| 261 | gi344294 | synthetic | novel factor having neutrophil-stimulating activity | 618 | 96 |
| | | construct | | | |
| 261 | R13519 | Homo sapiens | Leukocyte derived growth factor. | 618 | 96 |
| 262 | gi9651963 | Xenopus laevis | putative N-terminal acetyltransferase | 603 | 80 |
| 262 | gi6730746 | Arabidopsis | putative N-terminal acetyltransferase; 84330-89402 | 514 | 67 |
| | | thaliana | | | |
| 262 | gi7326500 | Caenorhabditis | contains similarity toTR: O74985 | 454 | 54 |
| | | elegans | | | |
| 263 | G01995 | Homo sapiens | Human secreted protein, SEQ ID NO: 6076. | 523 | 100 |
| 263 | gi1825586 | Caenorhabditis | contains similarity to C2 domains | 228 | 36 |
| | | elegans | | | |
| 263 | gi6687541 | Erysiphe pisi | transmembrane protein | 188 | 36 |
| 264 | gi1944389 | Mus musculus | Sh3y11 | 1238 | 86 |
| 264 | Y44988 | Homo sapiens | Human epidermal protein-5. | 1333 | 94 |
| 264 | gi500710 | Saccharomyces | Ysc84p | 562 | 52 |
| | | cerevisiae | | | |
| 265 | gi2645229 | Plectonema | kinesin light chain | 411 | 43 |
| | | boryanum | | | |
| 265 | gi1208772 | Gallus gallus | kinesin light chain | 373 | 31 |
| 265 | gi161532 | Strongylocentrotus | kinesin light chain isoform 4 | 379 | 41 |
| | | purpuratus | | | |
| 266 | gi4966262 | Caenorhabditis | Contains similarity to Pfam domain: PF00646 (F- | 1872 | 56 |
| | | elegans | box), Score = 28.7, E-value = 4.3e−05, N = 1 | | |
| 266 | gi6164741 | Homo sapiens | F-box protein Fbx11 | 661 | 99 |
| 266 | Y83079 | Homo sapiens | F-box protein FBP-11. | 661 | 99 |
| 267 | gi10441465 | Homo sapiens | actin filament associated protein | 1403 | 45 |
| 267 | gi487416 | Gallus gallus | actin filament protein | 1138 | 50 |
| 267 | gi487418 | Gallus gallus | actin filament-associated protein | 1285 | 46 |
| 268 | gi11323315 | Homo sapiens | dJ998C11.1 (continues in Em: AL445192 as | 374 | 30 |
| | | | bA269H4.1) | | |
| 268 | gi4185567 | Mus musculus | cAMP-dependent Rap1 guanine-nucleotide | 181 | 35 |
| | | | exchange factor | | |
| 268 | gi11611477 | Mus musculus | cAMP-GEFII | 181 | 35 |
| 269 | gi6580315 | Caenorhabditis | Y51H4A.13 | 144 | 29 |
| | | elegans | | | |
| 269 | W50192 | Homo sapiens | Amino acid sequence of salivary protein CON-1. | 91 | 32 |
| 269 | gi32384 | Homo sapiens | Hox2I protein (AA 1-301) | 126 | 29 |
| 270 | gi2815888 | Homo sapiens | MEK kinase 1 | 6983 | 99 |
| 270 | gi4583380 | Mus musculus | MAP kinase kinase kinase 1 | 6192 | 89 |
| 270 | gi1354137 | Rattus | MAP kinase kinase kinase 1 | 6153 | 89 |
| | | norvegicus | | | |
| 271 | gi6649931 | Homo sapiens | interleukin-1 receptor-associated kinase | 2317 | 95 |
| 271 | W14306 | Homo sapiens | Interleukin-1 receptor-associated protein kinase. | 2311 | 94 |
| 271 | gi12409196 | Mus musculus | pelle-like protein kinase | 1767 | 74 |
| 272 | gi5051670 | Homo sapiens | apoptotic protease activating factor-1 long isoform | 3274 | 100 |
| | | | APAF-1L | | |
| 272 | gi5869888 | Homo sapiens | apoptotic protease activating factor 1 | 3274 | 100 |
| 272 | gi3694813 | Mus musculus | apoptotic protease activating factor 1 | 2819 | 84 |
| 273 | gi5051670 | Homo sapiens | apoptotic protease activating factor-1 long isoform | 3274 | 100 |
| | | | APAF-1L | | |
| 273 | gi5869888 | Homo sapiens | apoptotic protease activating factor 1 | 3274 | 100 |
| 273 | gi3694813 | Mus musculus | apoptotic protease activating factor 1 | 2819 | 84 |
| 274 | gi1374695 | Homo sapiens | human protein homologous to DROER protein | 244 | 100 |
| 274 | gi6841073 | Xenopus laevis | enhancer of rudimentary homologue ERH | 244 | 100 |
| 274 | gi1620874 | Mus musculus | Mer | 244 | 100 |
| 275 | gi1657835 | Mus musculus | Rho-guanine nucleotide exchange factor | 2545 | 80 |
| 275 | gi5199316 | Homo sapiens | non-ocogenic Rho GTPase-specific GTP exchange | 710 | 36 |
| | | | factor | | |
| 275 | gi4469558 | Homo sapiens | breast cancer nuclear receptor-binding auxiliary | 663 | 35 |
| | | | protein | | |
| 276 | gi8388704 | Leishmania | probable CG14353 protein | 532 | 49 |
| | | major | | | |
| 276 | G03317 | Homo sapiens | Human secreted protein, SEQ ID NO: 7398. | 285 | 98 |
| 276 | gi1907211 | Saccharomyces | YCR072c, len: 515 | 87 | 28 |
| | | cerevisiae | | | |
| 277 | gi5823454 | Homo sapiens | GTPase-activating protein 6 isoform 4 | 728 | 38 |
| 277 | gi7243304 | Homo sapiens | rho-type GTPase-activating protein isoform 3 | 723 | 38 |
| 277 | gi5724778 | Mus musculus | rho-type GTPase-activating protein rhoGAPX-1 | 724 | 36 |
| 278 | gi1666073 | Homo sapiens | RRP22 protein | 509 | 52 |
| 278 | gi861254 | Caenorhabditis | similar to RAS-related proteins | 216 | 36 |
| | | elegans | | | |
| 278 | gi3947880 | Schizosaccharomyces | putative ras-related GTP-binding protein | 212 | 30 |
| | | pombe | | | |
| 279 | B29791 | Homo sapiens | Human steroidogenic acute regulatory protein | 336 | 34 |
| | | | homologue StAR-B. | | |
| 279 | gi11992399 | Mus musculus | StAR-related protein 1-4E | 327 | 36 |
| 279 | gi11992401 | Mus musculus | StAR-related protein p3-15E/p3-16E | 317 | 38 |
| 280 | gi3986768 | Mus musculus | G9A | 1074 | 47 |
| 280 | gi287865 | Homo sapiens | G9a | 1087 | 47 |
| 280 | gi4529889 | Homo sapiens | G9A | 1087 | 47 |
| 281 | gi287865 | Homo sapiens | G9a | 584 | 47 |
| 281 | gi4529889 | Homo sapiens | G9A | 584 | 47 |
| 281 | gi12803701 | Homo sapiens | ankyrin repeat-containing protein | 584 | 47 |
| 282 | gi3986768 | Mus musculus | G9A | 1022 | 47 |
| 282 | gi287865 | Homo sapiens | G9a | 1035 | 47 |
| 282 | gi4529889 | Homo sapiens | G9A | 1035 | 47 |
| 283 | gi6563258 | Homo sapiens | insulin receptor tyrosine kinase substrate | 1598 | 99 |
| 283 | gi4454524 | Homo sapiens | similar to insulin receptor substrate BAP2; similar | 1526 | 100 |
| | | | to PID: g4126477 | | |
| 283 | gi12803353 | Homo sapiens | Similar to BAI1-associated protein 2 | 400 | 31 |
| 284 | W88399 | Homo sapiens | Human testis secreted protein dx290_1. | 2605 | 99 |
| 284 | gi5281051 | Arabidopsis | stress-induced protein sti1-like protein | 159 | 28 |
| | | thaliana | | | |
| 284 | gi872116 | Glycine max | sti (stress inducible protein) | 156 | 26 |
| 285 | gi6492338 | Mus musculus | adaptor protein; DOKL | 1795 | 77 |
| 285 | gi7363368 | Mus musculus | inhibitory adapter molecule DOK3 | 1795 | 77 |
| 285 | gi3043919 | Homo sapiens | docking protein | 509 | 39 |
| 286 | gi36619 | Homo sapiens | serine/threonine protein kinase | 2452 | 97 |
| 286 | gi12654445 | Homo sapiens | PCTAIRE protein kinase 1 | 2452 | 97 |
| 286 | gi53611 | Mus musculus | PCTAIRE-1 protein kinase | 2408 | 94 |
| 287 | gi12484136 | Rattus | SMHS2 | 1905 | 84 |
| | | norvegicus | | | |
| 287 | gi3297882 | Homo sapiens | atopy related autoantigen CALC | 335 | 28 |
| 287 | gi2827631 | Arabidopsis | putative protein | 318 | 30 |
| | | thaliana | | | |
| 288 | gi1326341 | Caenorhabditis | weak similarity to regions of guanine-nucleotide | 262 | 35 |
| | | elegans | releasing factors | | |
| 288 | Y99660 | Homo sapiens | Human GTPase associated protein-11. | 205 | 81 |
| 288 | gi1293099 | Dictyostelium | aimless RasGEF | 200 | 26 |
| | | discoideum | | | |
| 289 | gi10801596 | Mus musculus | Doc2gamma | 1104 | 76 |
| 289 | gi1575774 | Rattus | Doc2A | 582 | 47 |
| | | norvegicus | | | |
| 289 | gi285646 | Bos taurus | ‘rabphilin-3A’ | 576 | 51 |
| 290 | Y99660 | Homo sapiens | Human GTPase associated protein-11. | 1043 | 100 |
| 290 | gi1326341 | Caenorhabditis | weak similarity to regions of guanine-nucleotide | 658 | 42 |
| | | elegans | releasing factors | | |
| 290 | gi2981229 | Drosophila | putative guanine nucleotide releasing factor | 575 | 61 |
| | | affinis | | | |
| 291 | gi1123123 | Caenorhabditis | coded for by C. elegans cDNA yk99b4.3; similar | 876 | 43 |
| | | elegans | to human transforming protein (PIR: S22157) | | |
| 291 | gi4099012 | Dictyostelium | drainin | 487 | 45 |
| | | discoideum | | | |
| 291 | gi1039341 | Schizosaccharomyces | putative GTPase-activator protein of Rab-like | 374 | 30 |
| | | pombe | small GTPases | | |
| 292 | gi550060 | Homo sapiens | GTP-binding protein | 562 | 100 |
| 292 | gi55457 | Mus musculus | Ypt1 protein (AA 1-205) | 562 | 100 |
| 292 | gi763158 | Mus musculus | GTP-binding protein | 562 | 100 |
| 293 | gi10279705 | Homo sapiens | bA243J16.3 (similar to MYLK (myosin, light | 3106 | 100 |
| | | | polypeptide kinase)) | | |
| 293 | gi165506 | Oryctolagus | myosin light chain kinase (EC 2.7.1.-) | 2669 | 86 |
| | | cuniculus | | | |
| 293 | gi205497 | Rattus | skeletal muscle light chain kinase (E.C. 2.7.1.37) | 2454 | 79 |
| | | norvegicus | | | |
| 294 | gi3599940 | Mus musculus | faciogenital dysplasia protein 2 | 2548 | 82 |
| 294 | gi3342246 | Rattus | actin-filament binding protein Frabin | 1558 | 49 |
| | | norvegicus | | | |
| 294 | gi722343 | Mus musculus | Fgd1 | 1491 | 49 |
| 295 | gi3851202 | Homo sapiens | ZO-3 | 4819 | 98 |
| 295 | gi3033501 | Canis familiaris | ZO-3 | 3858 | 83 |
| 295 | gi6690528 | Mus musculus | tight junction-associtated protein ZO-3 | 3629 | 79 |
| 296 | gi10440353 | Homo sapiens | FLJ00011 protein | 135 | 31 |
| 296 | gi915208 | Sus scrofa | gastric mucin | 145 | 20 |
| 296 | gi3108057 | Mus musculus | channel interacting PDZ domain protein | 137 | 27 |
| 297 | Y83085 | Homo sapiens | F-box protein FBP-17. | 2277 | 81 |
| 297 | gi10764488 | Homo sapiens | dactylin | 2217 | 100 |
| 297 | B07748 | Homo sapiens | A human cancer-associated protein-2 (CAP-2). | 2155 | 100 |
| 298 | gi10764488 | Homo sapiens | dactylin | 1597 | 100 |
| 298 | B07748 | Homo sapiens | A human cancer-associated protein-2 (CAP-2). | 1597 | 100 |
| 298 | gi7594782 | Mus musculus | mouse ortholog of the zebrafish hagoromo gene | 1530 | 94 |
| 299 | Y97293 | Homo sapiens | Lipid associated protein (LIPAP) 3335404CD1. | 2283 | 78 |
| 299 | gi5670328 | Homo sapiens | copine III | 1335 | 50 |
| 299 | B24231 | Homo sapiens | Human vesicle associated protein 10 SEQ ID | 1332 | 49 |
| | | | NO: 10. | | |
| 300 | gi10178646 | Hydra vulgaris | dishevelled | 199 | 46 |
| 300 | gi458868 | Drosophila | dishevelled | 193 | 41 |
| | | melanogaster | | | |
| 300 | gi516485 | Drosophila | dsh | 193 | 41 |
| | | melanogaster | | | |
| 301 | gi3560124 | Homo sapiens | LGMD2B protein | 126 | 34 |
| 301 | gi6572442 | Mus musculus | dysferlin | 125 | 34 |
| 301 | gi3600028 | Homo sapiens | dysferlin | 126 | 34 |
| 302 | gi51144 | Mus musculus | h2-calponin | 1030 | 76 |
| 302 | gi1526432 | Homo sapiens | neutral calponin | 1029 | 75 |
| 302 | gi1962 | Sus scrofa | h2-calponin | 1029 | 76 |
| 303 | gi2909372 | Homo sapiens | small glutamine-rich tetratricopeptide (SGT) | 860 | 58 |
| 303 | gi4539082 | Homo sapiens | small glutamine-rich tetratricopeptide repeat | 860 | 58 |
| | | | containing protein | | |
| 303 | gi4235146 | Homo sapiens | small glutamine-rich tetratricopeptide (SGT) | 860 | 58 |
| 304 | gi11320938 | Homo sapiens | SM-20 | 2314 | 100 |
| 304 | B10873 | Homo sapiens | Human tumor-associated antigen 9D7 protein. | 797 | 63 |
| 304 | gi469478 | Rattus | SM-20 | 786 | 62 |
| | | norvegicus | | | |
| 305 | gi11527997 | Homo sapiens | NOTCH2 protein | 1483 | 99 |
| 305 | gi11275978 | Homo sapiens | NOTCH 2 | 1471 | 98 |
| 305 | Y06816 | Homo sapiens | Human Notch2 (humN2) protein sequence. | 1471 | 98 |
| 306 | G02355 | Homo sapiens | Human secreted protein, SEQ ID NO: 6436. | 597 | 96 |
| 306 | gi3320122 | Rattus | espin | 160 | 36 |
| | | norvegicus | | | |
| 306 | gi9754902 | Mus musculus | espin | 158 | 38 |
| 307 | G04075 | Homo sapiens | Human secreted protein, SEQ ID NO: 8156. | 567 | 99 |
| 307 | gi5732618 | Homo sapiens | myosin-IXa | 142 | 46 |
| 307 | Y05781 | Homo sapiens | Human myosin IXa. | 142 | 46 |
| 308 | Z92427_aa1 | Homo sapiens | 26-JUN-1997 cDNA encoding human WD-40 | 1886 | 99 |
| | | | protein, WDPro1. | | |
| 308 | W84085 | Homo sapiens | Human membrane fusion protein WDPro1. | 1885 | 99 |
| 308 | Y77488 | Homo sapiens | Human WD-40 protein, WDPro1. | 1885 | 99 |
| 309 | gi1245357 | Homo sapiens | procollagen C-proteinase | 3836 | 99 |
| 309 | W13670 | Homo sapiens | C-proteinase encoded by clone pCP-2. | 3836 | 99 |
| 309 | gi179500 | Homo sapiens | bone morphogenetic protein 1 | 3836 | 99 |
| 310 | gi2429474 | Caenorhabditis | Contains similarity to Pfam domain: PF00169 | 448 | 32 |
| | | elegans | (PH), Score = 36.2, E-value = 4.4e−10, N = 1 | | |
| 310 | gi6650370 | Dictyostelium | rac serine/threonine kinase homolog | 114 | 29 |
| | | discoideum | | | |
| 310 | gi9759096 | Arabidopsis | AtPH1-like protein | 100 | 31 |
| | | thaliana | | | |
| 311 | gi5139689 | Homo sapiens | MOK protein kinase | 1848 | 94 |
| 311 | gi5139691 | Mus musculus | MOK protein kinase | 1491 | 81 |
| 311 | gi1127036 | Rattus | serine/threonine protein kinase | 475 | 40 |
| | | norvegicus | | | |
| 312 | gi202806 | Rattus | vasopressin receptor | 1578 | 67 |
| | | norvegicus | | | |
| 312 | gi11096303 | Homo sapiens | NALP1 | 614 | 36 |
| 312 | gi12656105 | Homo sapiens | NAC-alpha splice variant | 614 | 36 |
| 314 | Y69156 | Homo sapiens | Peptide HH2040-BF04 comprising domains V, | 392 | 100 |
| | | | VIA and VIB of protein kinase. | | |
| 314 | Y84322 | Homo sapiens | A human cardiovascular system associated protein | 125 | 36 |
| | | | kinase-3. | | |
| 314 | G02730 | Homo sapiens | Human secreted protein, SEQ ID NO: 6811. | 116 | 80 |
| 315 | gi3327808 | Homo sapiens | latent transforming growth factor-beta binding | 5211 | 97 |
| | | | protein 4S | | |
| 315 | gi2190402 | Homo sapiens | latent TGF-beta binding protein-4 | 4983 | 93 |
| 315 | gi3327814 | Homo sapiens | latent transforming growth factor-beta binding | 3871 | 99 |
| | | | protein 4 | | |
| 316 | gi6624055 | Homo sapiens | similar to ankyrin motif; note: this is probably the | 683 | 100 |
| | | | ankryin motif gene; h | | |
| 316 | gi1655418 | Homo sapiens | ankyrin motif | 554 | 98 |
| 316 | B28628 | Homo sapiens | Human B11Ag1 antigen splice isoform B11C-15. | 452 | 44 |
| 317 | gi3157494 | Homo sapiens | myosin phosphatase targeting/regulatory subunit | 536 | 33 |
| 317 | gi12642660 | Homo sapiens | myosin phosphatase target subunit 2 | 536 | 33 |
| 317 | W71632 | Homo sapiens | Human myosin L-chain binding subunit affinity | 536 | 33 |
| | | | protein. | | |
| 318 | gi1176422 | Mus musculus | rhophilin | 1817 | 75 |
| 318 | B43571 | Homo sapiens | Human cancer associated protein sequence SEQ | 1278 | 99 |
| | | | ID NO: 1016. | | |
| 318 | gi4868350 | Drosophila | rhophilin | 881 | 38 |
| | | melanogaster | | | |
| 319 | gi12654513 | Homo sapiens | Similar to block of proliferation 1 | 3618 | 100 |
| 319 | gi1679772 | Mus musculus | Bop1 | 3300 | 83 |
| 319 | gi4586061 | Arabidopsis | putative WD-40 repeat protein | 1435 | 41 |
| | | thaliana | | | |
| 320 | gi6907097 | Oryza sativa | Similar to Arabidopsis thaliana DNA chromosome | 216 | 37 |
| | | | 4, ESSA I contig fragment No. 6; calcium channel | | |
| | | | protein alpha-1 chain isoform A —rat. (Z97341) | | |
| 320 | gi5123545 | Arabidopsis | arginine methyltransferase (pam1) | 190 | 29 |
| | | thaliana | | | |
| 320 | gi498761 | Saccharomyces | YBR0320 | 186 | 37 |
| | | cerevisiae | | | |
| 321 | gi2459833 | Rattus | Maxp1 | 1696 | 86 |
| | | norvegicus | | | |
| 321 | gi2997698 | Mus musculus | putative ras effector Nore1 | 1606 | 82 |
| 321 | Y94451 | Human | 965 | 98 | |
| | | inflammation | | | |
| | | associated | | | |
| | | protein | | | |
| 322 | B45187 | Homo sapiens | Human secreted protein sequence encoded by | 874 | 100 |
| | | | gene 15 SEQ ID NO: 128. | | |
| 322 | B45186 | Gene 15 human | 441 | 47 | |
| | | secreted protein | | | |
| | | homologous | | | |
| | | amino acid | | | |
| | | sequence | | | |
| 322 | gi4808585 | Homo sapiens | KH type splicing regulatory protein; KSRP | 83 | 42 |
| 323 | gi10764778 | Homo sapiens | phosphoinositol 3-phosphate-binding protein-2 | 5835 | 100 |
| 323 | B32403 | Homo sapiens | Human secreted protein sequence encoded by | 2040 | 99 |
| | | | gene 33 SEQ ID NO: 89. | | |
| 323 | W44864 | Homo sapiens | Human TPC2 telomere length and telomerase | 649 | 49 |
| | | | regulatory protein. | | |
| 324 | gi9651791 | Mus musculus | interleukin-1 delta | 309 | 45 |
| 324 | gi6165413 | Mus musculus | IL-1L1 protein | 307 | 47 |
| 324 | gi7769118 | Mus musculus | interleukin-1 homolog 3 | 307 | 47 |
| 325 | gi2447128 | Paramecium | contains 10 ankyrin-like repeats; similar to human | 278 | 40 |
| | | bursaria | ankyrin, corresponds to Swiss-Prot Accession | | |
| | | Chlorella virus 1 | Number P16157 | | |
| 325 | gi3893155 | Homo sapiens | ankyrin repeat protein | 231 | 32 |
| 325 | gi3618345 | Homo sapiens | 26S proteasome subunit p28 | 231 | 32 |
| 326 | gi3860079 | Drosophila | bicoid-interacting protein 4 | 427 | 41 |
| | | melanogaster | | | |
| 326 | gi1072163 | Caenorhabditis | similar to protein kinases | 389 | 44 |
| | | elegans | | | |
| 326 | gi871986 | Avena sativa | putative pp70 ribosomal protein S6 kinase | 410 | 40 |
| 327 | gi11559550 | Homo sapiens | dynein axonemal intermediate chain | 3183 | 99 |
| 327 | gi11493148 | Homo sapiens | intermediate dynein chain | 3179 | 99 |
| 327 | gi927639 | Anthocidaris | dynein intermediate chain 3 | 2152 | 68 |
| | | crassispina | | | |
| 328 | gi2565396 | Mus musculus | schwannoma-associated protein | 359 | 38 |
| 328 | W57899 | Homo sapiens | Protein of clone CI480_9. | 353 | 43 |
| 328 | B08441 | Homo sapiens | Amino acid sequence of secreted protein clone | 353 | 43 |
| | | | CI480_9. | | |
| 329 | gi1772658 | Rattus | Srg1 | 2076 | 95 |
| | | norvegicus | | | |
| 329 | gi11559313 | Halocynthia | synaptotagmin | 443 | 33 |
| | | roretzi | | | |
| 329 | gi643654 | Rattus | synaptotagmin VI | 442 | 36 |
| | | norvegicus | | | |
| 330 | G03274 | Homo sapiens | Human secreted protein, SEQ ID NO: 7355. | 424 | 100 |
| 330 | gi4099880 | Homo sapiens | myosin heavy chain 12 | 120 | 29 |
| 330 | gi3776579 | Arabidopsis | Strong similarity to F22O13.22 | 119 | 22 |
| | | thaliana | | | |
| 331 | gi9837385 | Takifugu | retinitis pigmentosa GTPase regulator-like protein | 278 | 20 |
| | | rubripes | | | |
| 331 | gi9837379 | Homo sapiens | retinitis pigmentosa GTPase regulator | 256 | 22 |
| 331 | gi1747 | Oryctolagus | trichohyalin | 161 | 41 |
| | | cuniculus | | | |
| 332 | gi404634 | Mus musculus | serine/threonine kinase | 407 | 44 |
| 332 | gi2738898 | Mus musculus | protein kinase | 405 | 43 |
| 332 | gi992651 | Saccharomyces | Gin4p | 341 | 38 |
| | | cerevisiae | | | |
| 333 | gi2738898 | Mus musculus | protein kinase | 444 | 41 |
| 333 | gi404634 | Mus musculus | serine/threonine kinase | 442 | 43 |
| 333 | gi2632254 | Sorghum | serine/threonine kinase | 350 | 33 |
| | | bicolor | | | |
| 334 | gi6066585 | Mus musculus | GCN2 eIF2alpha kinase | 6539 | 91 |
| 334 | gi10764163 | Mus musculus | GCN2beta | 6529 | 90 |
| 334 | gi10764165 | Mus musculus | GCN2gamma | 6529 | 90 |
| 335 | gi1504010 | Homo sapiens | Similar to Mouse TFIIi-associated transactivator | 7797 | 100 |
| | | | factor p17(GB_RO: MMU11548): Containing | | |
| | | | protein kinase motif | | |
| 335 | gi1932805 | Mus musculus | MEK kinase 4b | 7233 | 89 |
| 335 | gi2352277 | Homo sapiens | MAP kinase kinase kinase | 6155 | 96 |
| 336 | gi1931654 | Arabidopsis | BRCA1-associated RING domain protein isolog; | 226 | 41 |
| | | thaliana | 106935-111081 | | |
| 336 | gi4225948 | Caenorhabditis | centaurin gamma 1A | 243 | 37 |
| | | elegans | | | |
| 336 | gi6465806 | Arabidopsis | GCN4-complementing protein (GCP1) | 226 | 41 |
| | | thaliana | | | |
| 337 | gi6088096 | Homo sapiens | protein kinase PKNbeta | 3912 | 98 |
| 337 | gi11493219 | Homo sapiens | dJ905H16.1 (protein kinase C-like 2) | 1186 | 60 |
| 337 | gi914100 | Homo sapiens | protein kinase PRK2 | 1186 | 60 |
| 338 | gi6448792 | Rattus | activator of G-protein signaling 3 | 1521 | 91 |
| | | norvegicus | | | |
| 338 | gi1408182 | Homo sapiens | LGN protein | 570 | 42 |
| 338 | gi1065449 | Caenorhabditis | similar to the postsynaptic membrane 43K protein | 191 | 31 |
| | | elegans | from Xenopus (PIR: A60088) | | |
| 339 | gi1177682 | Simian T-cell | Rex protein | 97 | 30 |
| | | lymphotropic | | | |
| | | virus | | | |
| 339 | gi1850850 | murine | serine threonine rich glycoprotein | 120 | 26 |
| | | herpesvirus 68 | | | |
| 339 | gi2317953 | murid | glycoprotein 150 | 120 | 26 |
| | | herpesvirus 4 | | | |
| 340 | gi12005908 | Homo sapiens | AD037 | 507 | 37 |
| 340 | Y73381 | Homo sapiens | HTRM clone 1877278 protein sequence. | 503 | 37 |
| 340 | B38475 | Homo sapiens | Fragment of human secreted protein encoded by | 408 | 43 |
| | | | gene 33 clone HACBZ59. | | |
| 341 | gi1789285 | Escherichia | putative nucleotide-binding protein | 652 | 47 |
| | | coli K12 | | | |
| 341 | gi12517450 | Escherichia | putative nucleotide-binding protein | 647 | 47 |
| | | coli O157: H7 | | | |
| 341 | gi3647204 | Escherichia | chromosome arginine transport ATPase | 599 | 47 |
| | | coli | | | |
| 342 | gi9998950 | Homo sapiens | ankyrin repeat-containing protein | 3872 | 100 |
| 342 | gi12044278 | Homo sapiens | krev interaction trapped 1 | 3864 | 99 |
| 342 | gi12044280 | Mus musculus | krev interaction trapped 1 | 3637 | 93 |
| 343 | gi12003994 | Homo sapiens | membrane-associated guanylate kinase-related | 4713 | 99 |
| | | | MAGI-3 | | |
| 343 | gi12003992 | Mus musculus | membrane-associated guanylate kinase-related | 4459 | 94 |
| | | | MAGI-3 | | |
| 343 | gi7650497 | Rattus | scaffolding protein SLIPR | 4322 | 92 |
| | | norvegicus | | | |
| 344 | gi8052233 | Homo sapiens | putative ankyrin-repeat containing protein | 726 | 62 |
| 344 | gi12060822 | Homo sapiens | serologically defined breast cancer antigen NY- | 305 | 32 |
| | | | BR-16 | | |
| 344 | gi11321435 | Rattus | ankyrin repeat-rich membrane-spanning protein | 281 | 31 |
| | | norvegicus | | | |
| 345 | gi8052233 | Homo sapiens | putative ankyrin-repeat containing protein | 1475 | 67 |
| 345 | gi12060822 | Homo sapiens | serologically defined breast cancer antigen NY- | 402 | 31 |
| | | | BR-16 | | |
| 345 | gi11415014 | Rattus | KIDINS220 | 385 | 30 |
| | | norvegicus | | | |
| 346 | gi3930525 | Mus musculus | sex-determination protein homolog Fem1a | 2585 | 78 |
| 346 | gi9187608 | Homo sapiens | similar to (NP_034322.1\|) sex-determination | 1134 | 69 |
| | | | protein homolog Fem1a | | |
| 346 | gi3930527 | Mus musculus | sex-determination protein homolog Fem1b | 510 | 29 |
| 347 | gi12274842 | Homo sapiens | bA157P1.1.1 (laminin alpha 5) | 20092 | 100 |
| 347 | gi2599232 | Mus musculus | laminin alpha 5 chain | 15824 | 79 |
| 347 | gi2281044 | Homo sapiens | laminin alpha 5 chain | 4948 | 99 |
| 348 | gi9622151 | Homo sapiens | TNF intracellular domain-interacting protein | 332 | 40 |
| 348 | Y96727 | Homo sapiens | Casein kinase II interacting protein 1 (CKIP-1). | 332 | 40 |
| 348 | gi9622149 | Mus musculus | TNF intracellular domain-interacting protein | 327 | 31 |
| 349 | gi8101585 | Mus musculus | testis specific serine kinase-3 | 1241 | 90 |
| 349 | gi2738898 | Mus musculus | protein kinase | 671 | 47 |
| 349 | gi404634 | Mus musculus | serine/threonine kinase | 661 | 46 |
| 350 | G01248 | Homo sapiens | Human secreted protein, SEQ ID NO: 5329. | 288 | 100 |
| 350 | Y83073 | Homo sapiens | F-box motif of FBP protein. | 65 | 43 |
| 350 | gi3293318 | Caenorhabditis | leucine-rich repeat protein SOC-2 | 88 | 25 |
| | | elegans | | | |
| 351 | gi9837385 | Takifugu | retinitis pigmentosa GTPase regulator-like protein | 278 | 20 |
| | | rubripes | | | |
| 351 | gi9837379 | Homo sapiens | retinitis pigmentosa GTPase regulator | 256 | 22 |
| 351 | gi1747 | Oryctolagus | trichohyalin | 161 | 41 |
| | | cuniculus | | | |
| 352 | gi1504038 | Homo sapiens | similar to human ankyrin 1(S08275) | 521 | 44 |
| 352 | gi3320122 | Rattus | espin | 256 | 33 |
| | | norvegicus | | | |
| 352 | gi12018147 | Chlamydomonas | vegetative cell wall protein gp1 | 314 | 29 |
| | | reinhardtii | | | |
| 353 | gi9502080 | Mus musculus | tubby super-family protein | 295 | 35 |
| 353 | gi9858154 | Homo sapiens | tubby super-family protein | 295 | 35 |
| 353 | gi7176 | Dictyostelium | coding region (AA 1-437) | 143 | 26 |
| | | discoideum | | | |
| 354 | gi404634 | Mus musculus | serine/threonine kinase | 541 | 44 |
| 354 | gi2738898 | Mus musculus | protein kinase | 525 | 42 |
| 354 | gi8101585 | Mus musculus | testis specific serine kinase-3 | 501 | 41 |
| 355 | gi35833 | Homo sapiens | inducible membrane protein | 242 | 29 |
| 355 | gi258295 | Homo sapiens | C33 antigen = type III integral membrane protein | 242 | 29 |
| 355 | gi806806 | Homo sapiens | cell surface glycoprotein | 242 | 29 |
| 356 | gi4689229 | Rattus | b-tomosyn isoform | 2651 | 68 |
| | | norvegicus | | | |
| 356 | gi3790389 | Rattus | m-tomosyn | 2651 | 68 |
| | | norvegicus | | | |
| 356 | gi4689231 | Rattus | s-tomosyn isoform | 2651 | 68 |
| | | norvegicus | | | |
| 357 | gi6996558 | Mus musculus | myosin X | 873 | 43 |
| 357 | gi1755049 | Bos taurus | myosin X | 875 | 43 |
| 357 | gi7188794 | Homo sapiens | myosin X | 862 | 43 |
| 358 | gi484296 | Rattus | Synaptotagmin III | 2965 | 95 |
| | | norvegicus | | | |
| 358 | gi1840399 | Mus musculus | synaptotagmin 3 | 2958 | 95 |
| 358 | gi1321655 | Mus musculus | synaptotagumin III | 2947 | 94 |
| 359 | gi5757703 | Mus musculus | syntrophin-associated serine-threonine protein | 3106 | 49 |
| | | | kinase | | |
| 359 | gi406058 | Mus musculus | protein kinase | 2964 | 65 |
| 359 | gi6729348 | Arabidopsis | IRE homolog 1 | 764 | 39 |
| | | thaliana | | | |
| 360 | gi1666071 | Homo sapiens | GAR22 protein | 783 | 57 |
| 360 | gi12804707 | Homo sapiens | GAS2-related on chromosome 22 | 783 | 57 |
| 360 | gi1707491 | Homo sapiens | GAR22 protein | 774 | 58 |
| 361 | gi6066585 | Mus musculus | GCN2 eIF2alpha kinase | 7782 | 90 |
| 361 | gi10764163 | Mus musculus | GCN2beta | 7772 | 90 |
| 361 | gi10764165 | Mus musculus | GCN2gamma | 7379 | 90 |
| 362 | gi286103 | Mus musculus | nedd-1 protein | 2689 | 84 |
| 362 | gi10177570 | Arabidopsis | contains similarity to regulatory protein | 394 | 26 |
| | | thaliana | Nedd1˜gene_id: K18J17.16 | | |
| 362 | gi6979998 | Drosophila | putative microtubule severing protein katanin p80 | 212 | 27 |
| | | melanogaster | subunit | | |
| 363 | gi5410330 | Homo sapiens | spindlin | 1099 | 84 |
| 363 | gi11559844 | Homo sapiens | spindlin 1 | 1091 | 84 |
| 363 | gi12061053 | Homo sapiens | Spin | 1091 | 84 |
| 364 | gi2330663 | Schizosaccharomyces | coronin-like protein | 500 | 33 |
| | | pombe | | | |
| 364 | gi7630165 | Schizosaccharomyces | WD repeat protein; possible nuclear pore complex | 196 | 26 |
| | | pombe | associated | | |
| 364 | gi886024 | Thermomonospora | PkwA | 197 | 26 |
| | | curvata | | | |
| 365 | gi607134 | Mus musculus | developmental kinase 1 | 937 | 66 |
| 365 | gi2462302 | Gallus gallus | Eph-like receptor tyrosine kinase | 927 | 57 |
| 365 | gi755568 | Rattus | Ehk-3, full length form | 937 | 65 |
| | | norvegicus | | | |
| 366 | gi49809 | Mus musculus | alpha-2 collagen | 4206 | 91 |
| 366 | gi62877 | Gallus gallus | type VI collagen alpha-2 subunit preprotein | 3267 | 74 |
| 366 | gi62882 | Gallus gallus | type VI collagen subunit alpha2 | 3267 | 74 |
| 367 | gi1498250 | Dictyostelium | myosin light chain kinase | 557 | 40 |
| | | discoideum | | | |
| 367 | gi9837341 | Homo sapiens | CamKI-like protein kinase | 526 | 39 |
| 367 | gi406113 | Rattus | protein kinase I | 522 | 36 |
| | | norvegicus | | | |
| 368 | gi12382787 | Homo sapiens | OSBP-related protein 6; ORP6 | 4915 | 99 |
| 368 | gi10880973 | Homo sapiens | oxysterol binding protein-related protein 3 | 2720 | 59 |
| 368 | gi12382789 | Homo sapiens | OSBP-related protein 7; ORP7 | 1575 | 58 |
| 369 | gi4539084 | Homo sapiens | GRIP1 protein | 4364 | 100 |
| 369 | gi1890856 | Rattus | AMPA receptor interacting protein GRIP | 4220 | 94 |
| | | norvegicus | | | |
| 369 | gi4587895 | Rattus | glutamate receptor interacting protein 2 | 1956 | 59 |
| | | norvegicus | | | |
| 370 | gi8052233 | Homo sapiens | putative ankyrin-repeat containing protein | 1755 | 64 |
| 370 | gi12060822 | Homo sapiens | serologically defined breast cancer antigen NY- | 402 | 31 |
| | | | BR-16 | | |
| 370 | gi11415014 | Rattus | KIDINS220 | 385 | 30 |
| | | norvegicus | | | |
| 371 | gi4929729 | Homo sapiens | CGI-130 protein | 527 | 92 |
| 371 | gi12804521 | Homo sapiens | Similar to CGI-130 protein | 350 | 100 |
| 371 | gi1788628 | Escherichia | putative alpha helix protein | 124 | 30 |
| | | coli K12 | | | |
| 372 | gi3608372 | Rattus | brain specific cortactin-binding protein CBP90 | 2650 | 82 |
| | | norvegicus | | | |
| 372 | gi8980338 | Takifugu | FRANK2 protein | 1872 | 33 |
| | | rubripes | | | |
| 372 | gi2914719 | Homo sapiens | match to Z43555 (NID: g572788) | 1365 | 100 |
| 373 | gi12382789 | Homo sapiens | OSBP-related protein 7; ORP7 | 4473 | 100 |
| 373 | gi12382787 | Homo sapiens | OSBP-related protein 6; ORP6 | 1582 | 58 |
| 373 | gi10880973 | Homo sapiens | oxysterol binding protein-related protein 3 | 1626 | 56 |
| 374 | gi11493840 | Homo sapiens | zinc finger protein 106 | 9818 | 99 |
| 374 | gi3372657 | Mus musculus | zinc finger protein 106 | 6212 | 69 |
| 374 | gi2772588 | Mus musculus | potential grb2 and fyn-binding protein; serine- and | 1793 | 61 |
| | | | threonine-rich protein | | |
| 375 | gi1200456 | Mus musculus | MUS p66 Shc | 409 | 51 |
| 375 | gi558999 | Mus musculus | Shcp52 | 409 | 51 |
| 375 | gi36454 | Homo sapiens | SHC transforming protein | 407 | 53 |
| 376 | gi11546046 | Homo sapiens | dJ1100H13.4 (putative RhoGAP domain | 562 | 94 |
| | | | containing protein) | | |
| 376 | gi3184264 | Homo sapiens | F02569_2 | 127 | 42 |
| 376 | gi984749 | Mus musculus | RIP1 | 143 | 33 |
| 377 | gi3337443 | Homo sapiens | NADH-ubiquinone oxidoreductase NDUFS2 | 1263 | 100 |
| | | | subunit | | |
| 377 | gi12652835 | Homo sapiens | NADH dehydrogenase (ubiquinone) Fe-S protein | 1263 | 100 |
| | | | 2 (49 kD) (NADH-coenzyrne Q reductase) | | |
| 377 | Y14555 | Homo sapiens | Human NADH dehydrogenase subunit 1 protein. | 1263 | 100 |
| 378 | gi550013 | Homo sapiens | ribosomal protein L5 | 554 | 93 |
| 378 | gi11640568 | Homo sapiens | MSTP030 | 554 | 93 |
| 378 | gi57125 | Rattus | ribosomal protein L5 (AA 1-297) | 548 | 92 |
| | | norvegicus | | | |
| 379 | gi2853081 | Arabidopsis | ATP binding protein-like | 781 | 59 |
| | | thaliana | | | |
| 379 | gi9655501 | Vibrio cholerae | mrp protein | 699 | 53 |
| 379 | gi12516326 | Escherichia | putative ATPase | 690 | 51 |
| | | coli O157:H7 | | | |
| 380 | gi2706447 | Sorex araneus | transthyretin | 306 | 85 |
| 380 | gi1420 | Ovis aries | transthyretin | 296 | 85 |
| 380 | gi2696504 | Bos taurus | transthyretin | 287 | 86 |
| 381 | gi255248 | Saccharomyces | QRI5 | 77 | 40 |
| | | cerevisiae, | | | |
| | | Peptide, 111 aa | | | |
| 381 | gi544504 | Saccharomyces | Qri5p | 77 | 40 |
| | | cerevisiae | | | |
| 381 | gi33442 | Homo sapiens | Ly91 Ig mu heavy chain precursor | 64 | 32 |
| 382 | gi255248 | Saccharomyces | QRI5 | 77 | 40 |
| | | cerevisiae, | | | |
| | | Peptide, 111 aa | | | |
| 382 | gi544504 | Saccharomyces | Qri5p | 77 | 40 |
| | | cerevisiae | | | |
| 382 | gi4579731 | Clostridium | NTNH | 61 | 30 |
| | | botulinum D | | | |
| | | phage | | | |
| 383 | gi12249115 | Coprinus | Clp1 | 71 | 30 |
| | | cinereus | | | |
| 383 | Y21090 | Homo sapiens | Human p53 cellular tumor antigen mutant protein | 62 | 38 |
| | | | fragment 27. | | |
| 383 | gi3127111 | Hydra vulgaris | protein-tyrosine kinase HTK48 | 61 | 33 |
| 384 | gi12803105 | Homo sapiens | nucleobindin 1 | 1028 | 75 |
| 384 | gi1144316 | Homo sapiens | nucleobindin | 1006 | 73 |
| 384 | R49667 | Homo sapiens | Human nucleobindin. | 999 | 73 |
| 385 | B44867 | Homo sapiens | Human secreted protein encoded by gene 38. | 130 | 96 |
| 385 | gi3093373 | Mus musculus | SPR2I protein | 83 | 44 |
| 385 | gi3093367 | Mus musculus | SPR2F protein | 79 | 41 |
| 386 | B44867 | Homo sapiens | Human secreted protein encoded by gene 38. | 130 | 96 |
| 386 | gi643447 | Malus x | S3-RNase precursor | 77 | 24 |
| | | domestica | | | |
| 386 | gi9955513 | Arabidopsis | putative protein | 76 | 29 |
| | | thaliana | | | |
| 387 | gi10934059 | Homo sapiens | non-biotin containing subunit of 3- | 2923 | 100 |
| | | | methylcrotonyl-CoA carboxylase | | |
| 387 | gi12382294 | Homo sapiens | 3-methylcrotonyl-CoA carboxylase beta subunit | 2923 | 100 |
| 387 | gi9948017 | Pseudomonas | probable acyl-CoA carboxyltransferase beta chain | 1854 | 65 |
| | | aeruginosa | | | |
| 388 | Y48524 | Homo sapiens | Human breast tumor-associated protein 69. | 257 | 100 |
| 388 | gi4490721 | Arabidopsis | squalene epoxidase-like protein | 45 | 58 |
| | | thaliana | | | |
| 388 | gi535358 | Neisseria | Opa15063G | 62 | 42 |
| | | gonorrhoeae | | | |
| 389 | gi155798 | Aplysia sp. | R15-1 neuroactive peptide precursor | 46 | 53 |
| 389 | gi7959741 | Homo sapiens | PRO1051 | 57 | 32 |
| 389 | gi155800 | Aplysia sp. | R15-2 neuroactive peptide precursor | 46 | 53 |
| 390 | gi35071 | Homo sapiens | precursor polypeptide (AA-29 to 315) | 1749 | 100 |
| 390 | gi200071 | Mus musculus | methylenetetrahydrofolate dehydrogenase- | 1652 | 92 |
| | | | methenyltetrahydrofolate cyclohydrolase | | |
| 390 | gi200081 | Mus musculus | NAD-dependent methylenetetrahydrofolate | 1652 | 92 |
| | | | dehydrogenase-methenyltetrahydrofolate | | |
| | | | cyclohydrolase | | |
| 391 | gi3287265 | Rattus | E-STOP protein | 188 | 33 |
| | | norvegicus | | | |
| 391 | gi1370291 | Rattus | STOP protein | 188 | 33 |
| | | norvegicus | | | |
| 391 | gi3171934 | Mus musculus | neuronal-STOP protein | 186 | 34 |
| 392 | gi9957242 | Canis familiaris | progesterone receptor | 103 | 32 |
| 392 | gi2058326 | Homo sapiens | subunit of RNA polymerase II transcription factor | 95 | 33 |
| | | | TFIID | | |
| 392 | gi2290390 | Strongyloides | IgG and IgE immunoreactive antigen recognized | 83 | 37 |
| | | stercoralis | by sera from patients with strongyloidiasis | | |
| 393 | gi11386113 | Homo sapiens | FKSG25 | 2664 | 100 |
| 393 | gi10934047 | Mus musculus | Scot-t1 | 2048 | 75 |
| 393 | gi10934052 | Mus musculus | Scot-t2 | 2038 | 75 |
| 394 | Y27573 | Homo sapiens | Human secreted protein encoded by gene No. 7. | 331 | 46 |
| 394 | Y31830 | Homo sapiens | Human adult brain secreted protein nh899_8. | 329 | 51 |
| 394 | Y79328 | Homo sapiens | Human ligand receptor Lynx2. | 106 | 34 |
| 395 | gi529225 | Caenorhabditis | similar to ZK1236.3 | 75 | 23 |
| | | elegans | | | |
| 396 | W58386 | Homo sapiens | Human secreted protein BR595_4. | 492 | 95 |
| 396 | gi8250239 | Homo sapiens | protein phosphatase 4 regulatory subunit 2 | 302 | 95 |
| 396 | gi8468621 | Plasmodium | mature parasite-infected erythrocyte surface | 127 | 32 |
| | | falciparum | antigen | | |
| 397 | gi11094293 | Homo sapiens | brain link protein-1 | 1869 | 100 |
| 397 | B12304 | Homo sapiens | Human secreted protein encoded by gene 4 clone | 1856 | 99 |
| | | | HFXHC41. | | |
| 397 | gi11094297 | Rattus | brain link protein-1 | 1708 | 91 |
| | | norvegicus | | | |
| 398 | gi58059 | synthetic | BBI(AA 1-72) | 57 | 40 |
| | | construct | | | |
| 398 | B25671 | Homo sapiens | Human secreted protein sequence encoded by | 75 | 30 |
| | | | gene 7 SEQ ID NO: 60. | | |
| 398 | gi508623 | Glycine max | Bowman-Birk protease inhibitor | 55 | 52 |
| 399 | gi3041877 | Homo sapiens | IB3089A | 2152 | 52 |
| 399 | W70899 | Homo sapiens | Protein encoded by tumor suppressor gene | 2152 | 52 |
| | | | IB3089A. | | |
| 399 | Y44704 | Homo sapiens | Human tumor suppressor protein IB3089A. | 2152 | 52 |
| 400 | G03576 | Homo sapiens | Human secreted protein, SEQ ID NO: 7657. | 153 | 53 |
| 400 | gi8650491 | porcine | 198R | 64 | 35 |
| | | adenovirus 3 | | | |
| 400 | gi643439 | Pneumocystis | major surface glycoprotein | 85 | 48 |
| | | carinii | | | |
| 401 | gi7248902 | Gallus gallus | NOELIN-2 | 1618 | 64 |
| 401 | gi442368 | Rattus | neuronal olfactomedin-related ER localized | 1614 | 64 |
| | | norvegicus | protein | | |
| 401 | gi3218528 | Mus musculus | pancortin-3 | 1610 | 64 |
| 402 | gi442370 | Rattus | neuronal olfactomedin-related ER localized | 1744 | 66 |
| | | norvegicus | protein | | |
| 402 | gi7211681 | Gallus gallus | neuronal olfactomedin-related ER localized | 1743 | 65 |
| | | | protein | | |
| 402 | gi3218524 | Mus musculus | pancortin-1 | 1740 | 66 |
| 403 | V28845_aa1 | Homo sapiens | 13-SEP-1996 Human coxsackievirus and | 372 | 34 |
| | | | adenovirus receptor encoding DNA. | | |
| 403 | gi1881447 | Homo sapiens | coxsackie and adenovirus receptor protein | 368 | 34 |
| 403 | gi1946351 | Homo sapiens | cell surface protein HCAR | 368 | 34 |
| 404 | B12127 | Homo sapiens | Hydrophobic domain protein isolated from HT- | 2437 | 97 |
| | | | 1080 cells. | | |
| 404 | gi7573504 | Drosophila | TEP2 protein | 510 | 30 |
| | | melanogaster | | | |
| 404 | gi7573506 | Drosophila | TEP3 protein | 445 | 27 |
| | | melanogaster | | | |
| 405 | gi5901808 | Drosophila | BcDNA.GH03694 | 839 | 48 |
| | | melanogaster | | | |
| 405 | gi9502156 | Arabidopsis | contains similarity to Drosophila melanogaster | 308 | 30 |
| | | thaliana | BcDNA.GH03694 (GB: AAD55412) | | |
| 405 | gi6850839 | Arabidopsis | putative protein | 248 | 28 |
| | | thaliana | | | |
| 406 | gi310102 | Rattus | elongation factor G | 1218 | 89 |
| | | norvegicus | | | |
| 406 | gi4895248 | Arabidopsis | putative mitochondrial translation elongation | 776 | 66 |
| | | thaliana | factor G | | |
| 406 | gi12321017 | Arabidopsis | mitochondrial elongation factor, putative | 774 | 65 |
| | | thaliana | | | |
| 407 | Y76143 | Homo sapiens | Human secreted protein encoded by gene 20. | 1380 | 98 |
| 407 | B44778 | Homo sapiens | Human secreted protein sequence encoded by | 62 | 27 |
| | | | gene 17 SEQ IDNO: 77. | | |
| 407 | gi3093324 | Myxine | ATPase 8 | 39 | 60 |
| | | glutinosa | | | |
| 408 | gi10716074 | Mus musculus | M83 protein | 315 | 33 |
| 408 | Y52590 | Homo sapiens | Human prostate growth-associated membrane | 285 | 30 |
| | | | protein PGAMP-2. | | |
| 408 | gi10716072 | Homo sapiens | M83 protein | 290 | 31 |
| 409 | gi10303605 | Homo sapiens | CYP4F11 | 2804 | 99 |
| 409 | gi4519535 | Homo sapiens | Leukotriene B4 omega-hydroxylase | 2459 | 86 |
| 409 | gi1857022 | Homo sapiens | leukotriene B4 omega-hydroxylase | 2454 | 86 |
| 410 | Y54321 | Homo sapiens | A polypeptide designated ACRP30R1L which is a | 489 | 43 |
| | | | homologue of ACRP30. | | |
| 410 | B30232 | Homo sapiens | Human adipocyte complement related protein | 489 | 43 |
| | | | homologue zacrp2. | | |
| 410 | gi687606 | Lepomis | saccular collagen | 488 | 44 |
| | | macrochirus | | | |
| 411 | gi687606 | Lepomis | saccular collagen | 418 | 44 |
| | | macrochirus | | | |
| 411 | gi30054 | Homo sapiens | alpha1 (III) collagen | 424 | 48 |
| 411 | gi164896 | Oryctolagus | alpha-1 (VIII) collagen precursor | 383 | 49 |
| | | cuniculus | | | |
| 412 | gi177179 | Homo sapiens | alpha-2 type VIII collagen | 606 | 45 |
| 412 | gi264 | Bos taurus | type X collagen | 593 | 42 |
| 412 | gi4225951 | Homo sapiens | collagen X | 586 | 42 |
| 413 | gi687606 | Lepomis | saccular collagen | 411 | 44 |
| | | macrochirus | | | |
| 413 | gi164896 | Oryctolagus | alpha-1 (VIII) collagen precursor | 387 | 50 |
| | | cuniculus | | | |
| 413 | gi50481 | Mus musculus | alpha 1 (X) collagen chain | 362 | 46 |
| 414 | gi506431 | Homo sapiens | lysosomal acid lipase | 1150 | 53 |
| 414 | gi434306 | Homo sapiens | sterol esterase | 1148 | 53 |
| 414 | gi460143 | Homo sapiens | lysosomal acid lipase/cholesteryl ester hydrolase | 1148 | 53 |
| 415 | B08899 | Homo sapiens | Human secreted protein sequence encoded by | 2602 | 99 |
| | | | gene 9 SEQ ID NO: 56. | | |
| 415 | gi7331693 | Caenorhabditis | contains similarity to TR: Q22863 | 301 | 27 |
| | | elegans | | | |
| 415 | gi7320695 | Caenorhabditis | Y116F11B.7 | 307 | 28 |
| | | elegans | | | |
| 416 | W81030 | Homo sapiens | Melanoma associated antigen MG50. | 204 | 32 |
| 416 | gi1504040 | Homo sapiens | similar to D. melanogaster peroxidasin(U11052) | 203 | 32 |
| 416 | gi6273399 | Homo sapiens | melanoma-associated antigen MG50 | 203 | 32 |
| 417 | gi178284 | Homo sapiens | alpha-2-HS-glycoprotein | 1161 | 91 |
| 417 | gi7106502 | Homo sapiens | alpha2-HS glycoprotein | 1161 | 91 |
| 417 | W61492 | Homo sapiens | Human fetuin glycoprotein type 2. | 1161 | 91 |
| 418 | gi178284 | Homo sapiens | alpha-2-HS-glycoprotein | 1806 | 100 |
| 418 | gi7106502 | Homo sapiens | alpha2-HS glycoprotein | 1806 | 100 |
| 418 | W61492 | Homo sapiens | Human fetuin glycoprotein type 2. | 1806 | 100 |
| 419 | gi178284 | Homo sapiens | alpha-2-HS-glycoprotein | 1602 | 98 |
| 419 | gi7106502 | Homo sapiens | alpha2-HS glycoprotein | 1602 | 98 |
| 419 | W61492 | Homo sapiens | Human fetuin glycoprotein type 2. | 1602 | 98 |
| 420 | gi5123855 | Mus musculus | very-long-chain Acyl-CoA dehydrogenase | 1362 | 48 |
| 420 | gi2765125 | Mus musculus | very-long-chain acyl-CoA dehydrogenase | 1362 | 48 |
| 420 | gi559722 | Rattus | very-long-chain Acyl-CoA dehydrogenase | 1354 | 47 |
| | | norvegicus | | | |
| 421 | gi11125672 | Homo sapiens | dJ591C20.1 (novel protein similar to mouse | 2511 | 100 |
| | | | NG26) | | |
| 421 | gi4337103 | Homo sapiens | BAT5 | 1147 | 63 |
| 421 | Y91669 | Homo sapiens | Human secreted protein sequence encoded by | 1147 | 63 |
| | | | gene 73 SEQ ID NO: 342. | | |
| 422 | gi10732648 | Homo sapiens | angiopoietin-like protein PP1158 | 1021 | 96 |
| 422 | Y54496 | Homo sapiens | Human muscle angiopoietin-like growth factor | 1021 | 96 |
| | | | protein sequence. | | |
| 422 | Y86289 | Homo sapiens | Human secreted protein HDRMI82, SEQ ID | 1021 | 96 |
| | | | NO: 204. | | |
| 423 | gi467671 | Homo sapiens | ZN-alpha-2-glycoprotein | 754 | 91 |
| 423 | gi38026 | Homo sapiens | Zn-alpha2-glycoprotein | 754 | 91 |
| 423 | gi340442 | Homo sapiens | Zn-alpha-2-glycoprotein | 754 | 91 |
| 424 | gi9864185 | Drosophila | Crossveinless 2 | 930 | 36 |
| | | melanogaster | | | |
| 424 | gi7768636 | Xenopus laevis | Kielin | 672 | 29 |
| 424 | gi3649748 | Mus musculus | IgG Fc binding protein | 367 | 30 |
| 425 | B00073 | Homo sapiens | Human lysyl oxidase related protein (Lor)-2. | 2286 | 99 |
| 425 | A47799_aa1 | Homo sapiens | 27-JAN-1999 Human lysyl oxidase related protein | 2286 | 99 |
| | | | (Lor)-2 cDNA (CDS). | | |
| 425 | B12307 | Homo sapiens | Human secreted protein encoded by gene 7 clone | 2279 | 99 |
| | | | HAMFE82. | | |
| 426 | B18927 | Homo sapiens | A novel polypeptide designated PRO6030. | 1549 | 100 |
| 426 | Y73431 | Homo sapiens | Human secreted protein clone yb186_1 protein | 1169 | 100 |
| | | | sequence SEQ ID NO: 84. | | |
| 426 | gi3169566 | Drosophila | faint sausage | 126 | 29 |
| | | melanogaster | | | |
| 427 | gi189772 | Homo sapiens | prostaglandin D2 synthase | 561 | 95 |
| 427 | Y71471 | Homo sapiens | Human prostaglandin D2 synthase (PD2 | 561 | 95 |
| | | | synthase). | | |
| 427 | gi6178152 | Macaca fuscata | prostaglandin D synthase | 520 | 89 |
| 428 | B24476 | Homo sapiens | Human secreted protein sequence encoded by | 1302 | 77 |
| | | | gene 40 SEQ ID NO: 101. | | |
| 428 | gi5816699 | Canis familiaris | D4 dopamine receptor | 97 | 38 |
| 428 | gi11559408 | Canis familiaris | dopamine receptor D4 | 97 | 37 |
| 429 | B15563 | Homo sapiens | Fragment of apoptosis related protein encoded by | 46 | 37 |
| | | | gene 4 clone HEGAL46. | | |
| 429 | gi5458572 | Pyrococcus | LSU ribosomal protein L34E | 65 | 40 |
| | | abyssi | | | |
| 429 | W87504 | Homo sapiens | Human N-methyl-D-aspartate receptor subunit | 70 | 31 |
| | | | encoded by clone NMDA24. | | |
| 430 | Y36120 | Homo sapiens | Extended human secreted protein sequence, SEQ | 78 | 46 |
| | | | ID NO: 505. | | |
| 430 | Y27854 | Homo sapiens | Human secreted protein encoded by gene No. 101. | 65 | 39 |
| 430 | W88627 | Homo sapiens | Secreted protein encoded by gene 94 clone | 63 | 38 |
| | | | HPMBQ32. | | |
| 431 | gi4826463 | Homo sapiens | dJ287G14.1 (exon of a yet unidentified gene, or | 620 | 99 |
| | | | part of a psendogene?; similar to parts of BMP and | | |
| | | | Tolloid proteins) | | |
| 431 | G00601 | Homo sapiens | Human secreted protein, SEQ ID NO: 4682. | 426 | 97 |
| 431 | gi619861 | Homo sapiens | bone morphogenetic protein | 202 | 35 |
| 432 | gi11225238 | Homo sapiens | cytochrome P450 subfamily IIIA polypeptide 43 | 2624 | 99 |
| 432 | gi12642642 | Homo sapiens | cytochrome P450 CYP3A43 | 2624 | 99 |
| 432 | gi11225240 | Homo sapiens | cytochrome P450 subfamily IIIA polypeptide 43 | 2615 | 99 |
| 433 | Q89844_aa1 | Homo sapiens | 12-OCT-1993 Human death associated protein | 1838 | 90 |
| | | | DAP-7, also called cathepsin D. | | |
| 433 | V60292_aa1 | Homo sapiens | 03-MAR-1997 DNA sequence encoding death | 1838 | 90 |
| | | | associated protein (DAP)-7 (cathepsin D). | | |
| 433 | X87255_aa1 | Homo sapiens | 20-NOV-1998 cDNA clone encoding human | 1838 | 90 |
| | | | PRO292 (cathepsin D) | | |
| 434 | G01648 | Homo sapiens | Human secreted protein, SEQ ID NO: 5729. | 281 | 100 |
| 434 | Y13398 | Homo sapiens | Amino acid sequence of protein PRO346. | 272 | 31 |
| 434 | gi50369 | Mus musculus | precursor protein (AA-34 to 244) | 184 | 30 |
| 435 | gi3168604 | Homo sapiens | proline and glutamic acid rich nuclear protein | 5107 | 98 |
| | | | isoform | | |
| 435 | W31186 | Homo sapiens | Human p160 polypeptide 160.2. | 4723 | 98 |
| 435 | W31185 | Homo sapiens | Human p160 polypeptide 160.1. | 2948 | 99 |
| 436 | Y99357 | Homo sapiens | Human PRO1190 (UNQ604) amino acid sequence | 650 | 99 |
| | | | SEQ ID NO: 58. | | |
| 436 | Y27574 | Homo sapiens | Human secreted protein encoded by gene No. 8. | 602 | 98 |
| 436 | W52289 | Homo sapiens | Homo sapiens cdo tumor suppressor protein. | 184 | 43 |
| 437 | gi10799172 | Homo sapiens | uterine-derived 14 kDa protein | 742 | 100 |
| 437 | Y38388 | Homo sapiens | Human secreted protein encoded by gene No. 3. | 72 | 29 |
| 437 | gi6957462 | Homo sapiens | dJ159A19.3 (novel protein) | 81 | 35 |
| 438 | Y02692 | Homo sapiens | Human secreted protein encoded by gene 43 clone | 461 | 87 |
| | | | HTADX17. | | |
| 438 | gi10197717 | Homo sapiens | cell-surface molecule Ly-9 | 86 | 38 |
| 438 | G00272 | Homo sapiens | Human secreted protein, SEQ ID NO: 4353. | 86 | 38 |
| 439 | W59874 | Homo sapiens | Amino acid sequence of the cDNA clone CAT-1 | 454 | 96 |
| | | | (HTXET53). | | |
| 439 | Y08326 | Homo sapiens | Human granulysin P522 active fragment. | 454 | 96 |
| 439 | gi35065 | Homo sapiens | NKG5 product | 222 | 93 |
| 440 | gi6572165 | Homo sapiens | dJ1119A7.5 (novel protein (isoform 2)) | 546 | 99 |
| 440 | gi6572166 | Homo sapiens | dJ1119A7.5 (novel protein (isoform 1)) | 283 | 100 |
| 440 | gi10178387 | Streptomyces | putative monooxygenase | 110 | 27 |
| | | coelicolor | | | |
| 441 | B23602 | Homo sapiens | Human secreted protein SEQ ID NO: 4. | 1754 | 98 |
| 441 | Y52389 | Homo sapiens | Human transmembrane protein HP02219. | 887 | 100 |
| 441 | gi1065948 | Caenorhabditis | similar to thymidine diphosphoglucose 4,6- | 1281 | 67 |
| | | elegans | dehydratase | | |
| 442 | Y27621 | Homo sapiens | Human secreted protein encoded by gene No. 55. | 441 | 46 |
| 442 | gi3983152 | Mus musculus | schlafen3 | 133 | 31 |
| 442 | gi3983162 | Mus musculus | schlafen4 | 119 | 29 |
| 443 | gi4235144 | Homo sapiens | BC39498_1 | 1452 | 65 |
| 443 | gi9802037 | Homo sapiens | zinc finger protein SBZF3 | 1396 | 61 |
| 443 | gi1017722 | Homo sapiens | repressor transcriptional factor | 1366 | 62 |
| 444 | gi11493481 | Homo sapiens | PRO2474 | 433 | 100 |
| 444 | gi1171608 | Plasmodium | rps7 | 67 | 38 |
| | | falciparum | | | |
| 444 | gi10038818 | Buchnera sp. | glycyl-tRNA synthetase beta chain | 65 | 38 |
| | | APS | | | |
| 445 | gi6841740 | Homo sapiens | T-cell receptor beta chain | 55 | 62 |
| 445 | gi222640 | Strawberry | 24 K protein | 60 | 55 |
| | | mild yellow | | | |
| | | edge-associated | | | |
| | | virus | | | |
| 445 | gi847913 | Mus musculus | T cell receptor Vb14/Jb1.6 beta chain | 54 | 62 |
| 446 | gi12751092 | Homo sapiens | PNAS-123 | 346 | 100 |
| 446 | gi408899 | Mus musculus | serum amyloid A protein | 46 | 58 |
| 446 | gi1644360 | Mus musculus | serum amyloid A 5 | 46 | 58 |
| 447 | gi8886935 | Arabidopsis | F2D10.27 | 97 | 24 |
| | | thaliana | | | |
| 447 | gi1129158 | Saccharomyces | J1575L | 81 | 22 |
| | | cerevisiae | | | |
| 447 | gi1022328 | Myxococcus | Four tandem repeats of a DNA-binding domain | 89 | 34 |
| | | xanthus | known as the AT-hook are found at the carboxy | | |
| | | | terminus of CarD. This protein has been purified | | |
| | | | and found to bind in vitro to a promoter region | | |
| 448 | Y07896 | Homo sapiens | Human secreted protein fragment encoded from | 66 | 31 |
| | | | gene 45. | | |
| 448 | Y94967 | Homo sapiens | Human secreted protein clone au36_42 protein | 64 | 28 |
| | | | sequence SEQ ID NO: 140. | | |
| 448 | gi9280539 | Hepatitis B | surface antigen | 41 | 63 |
| | | virus | | | |
| 449 | Y19743 | Homo sapiens | SEQ ID NO 461 from WO9922243. | 972 | 99 |
| 449 | Y19541 | Homo sapiens | Amino acid sequence of a human secreted protein. | 265 | 100 |
| 449 | Y19745 | Homo sapiens | SEQ ID NO 463 from WO9922243. | 145 | 100 |
| 450 | gi186774 | Homo sapiens | zinc finger protein | 1557 | 51 |
| 450 | gi10440398 | Homo sapiens | FLJ00032 protein | 1739 | 58 |
| 450 | gi2739353 | Homo sapiens | ZNF91L | 1497 | 50 |
| 451 | gi8920230 | Homo sapiens | Spir-1 protein | 66 | 32 |
| 451 | gi9968169 | Human | gp120 | 55 | 30 |
| | | immunodeficiency | | | |
| | | virus type 1 | | | |
| 452 | G02783 | Homo sapiens | Human secreted protein, SEQ ID NO: 6864. | 344 | 100 |
| 452 | gi167684 | Dictyostelium | cAMP receptor | 56 | 35 |
| | | discoideum | | | |
| 452 | gi265734 | Dictyostelium, | cAMP receptor subtype 3 | 62 | 27 |
| | | Peptide, 490 aa | | | |
| 453 | gi11493502 | Homo sapiens | PRO3102 | 545 | 100 |
| 453 | gi6822268 | Mus musculus | CIP7 | 81 | 36 |
| 453 | W61601 | Homo sapiens | Human metallothionein HMBP-I. | 73 | 27 |
| 454 | G02139 | Homo sapiens | Human secreted protein, SEQ ID NO: 6220. | 287 | 98 |
| 454 | gi6448725 | Streptomyces | putative oxidoreductase | 67 | 38 |
| | | coelicolor | | | |
| | | A3(2) | | | |
| 454 | gi1486421 | Rhizobium sp. | OppC homologue | 66 | 34 |
| 455 | G01003 | Homo sapiens | Human secreted protein, SEQ ID NO: 5084. | 112 | 40 |
| 455 | gi12407427 | Mus musculus | tripartite motif protein TRIM13 | 108 | 36 |
| 455 | gi8217434 | Homo sapiens | bA67K19.2 (zinc-finger protein HT2A (72 kD | 129 | 32 |
| | | | TAT-interacting protein)) | | |
| 456 | gi12584159 | Homo sapiens | zinc finger protein 268 | 891 | 54 |
| 456 | gi4567178 | Homo sapiens | R31665_2 | 900 | 45 |
| 456 | gi498152 | Homo sapiens | ha0946 protein is Kruppel-related. | 900 | 52 |
| 457 | G00579 | Homo sapiens | Human secreted protein, SEQ ID NO: 4660. | 254 | 94 |
| 457 | gi5295832 | Homo sapiens | dJ21O18.2 (protein similar to collagen) | 48 | 37 |
| 457 | gi6526769 | Homo sapiens | HRIHFB2003 | 48 | 37 |
| 458 | gi213862 | Oncorhynchus | alpha-tubulin | 407 | 91 |
| | | mykiss | | | |
| 458 | gi202212 | Mus musculus | alpha-tubulin isotype M-alpha-6 | 407 | 91 |
| 458 | gi2843123 | Homo sapiens | alpha tubulin | 407 | 91 |
| 459 | gi532688 | Homo sapiens | thrombospondin-p50 | 292 | 97 |
| 459 | W40287 | Homo sapiens | Human TSP1 protein. | 134 | 50 |
| 459 | Y06182 | Homo sapiens | Thrombospondin I fragment. | 134 | 50 |
| 460 | gi9885325 | Homo sapiens | XAGE-1 | 796 | 100 |
| 460 | Y83169 | Homo sapiens | PAGE3 polypeptide. | 65 | 51 |
| 460 | Y83167 | Homo sapiens | PAGE1 polypeptide. | 62 | 52 |
| 461 | gi12044051 | Homo sapiens | ELOVL4 | 1712 | 99 |
| 461 | gi12044041 | Mus musculus | Elovl4 | 1595 | 92 |
| 461 | gi8101521 | Mus musculus | SSC2 | 682 | 45 |
| 462 | gi159725 | Octopus | alpha tubulin | 274 | 77 |
| | | dofleini | | | |
| 462 | gi10242166 | Notothenia | alpha tubulin | 269 | 74 |
| | | coriiceps | | | |
| 462 | gi2098753 | Gecarcinus | alpha-2-tubulin | 271 | 75 |
| | | lateralis | | | |
| 463 | gi12314165 | Homo sapiens | bA526D8.4 (novel KRAB box containing C2H2 | 4537 | 100 |
| | | | type zinc finger protein) | | |
| 463 | gi5679576 | Homo sapiens | zinc finger 41 | 2357 | 61 |
| 463 | gi340444 | Homo sapiens | zinc finger protein 41 | 2082 | 69 |
| 464 | gi10696977 | Homo sapiens | bA6J24.2 (A putative novel protein) | 388 | 88 |
| 464 | gi11127941 | Lotus | chalcone reductase | 52 | 31 |
| | | corniculatus | | | |
| 465 | gi12655452 | Homo sapiens | keratin associated protein 4.7 | 506 | 43 |
| 465 | gi12655456 | Homo sapiens | keratin associated protein 4.9 | 486 | 44 |
| 465 | gi12655460 | Homo sapiens | keratin associated protein 4.12 | 486 | 42 |
| 466 | gi6467206 | Homo sapiens | gonadotropin inducible transcription repressor-4 | 1172 | 56 |
| 466 | gi487785 | Homo sapiens | zinc finger protein ZNF136 | 1149 | 57 |
| 466 | gi3953593 | Mus musculus | Zinc finger protein s11-6 | 1031 | 51 |
| 467 | gi12314284 | Homo sapiens | dJ353C17.1 (novel protein) | 628 | 99 |
| 467 | gi8651 | Drosophila | structural sperm protein | 42 | 75 |
| | | melanogaster | | | |
| 467 | W71565 | Homo sapiens | Hepatocyte nuclear factor 4 alpha polypeptide | 57 | 43 |
| | | | (exon 2 product). | | |
| 468 | gi11493560 | Homo sapiens | PRO2730 | 711 | 100 |
| 468 | W74873 | Homo sapiens | Human secreted protein encoded by gene 145 | 531 | 100 |
| | | | clone HFXHL79. | | |
| 468 | B34691 | Homo sapiens | Human secreted protein encoded by DNA clone | 490 | 100 |
| | | | vp16 1. | | |
| 469 | gi189498 | Homo sapiens | pyrroline-5-carboxylate reductase | 496 | 83 |
| 469 | G03518 | Homo sapiens | Human secreted protein, SEQ ID NO: 7599. | 302 | 76 |
| 469 | gi4960118 | Homo sapiens | pyrroline-5-carboxylate reductase isoform | 229 | 52 |
| 470 | gi2689443 | Homo sapiens | R28830_2 | 3075 | 100 |
| 470 | gi9968290 | Homo sapiens | zinc finger protein 304 | 1624 | 51 |
| 470 | gi1020145 | Homo sapiens | DNA binding protein | 1412 | 53 |
| 471 | gi1167849 | Homo sapiens | NAD (H)-specific isocitrate dehydrogenase | 1984 | 97 |
| | | | gamma subunit precursor | | |
| 471 | gi1673432 | Homo sapiens | NAD(H)-specific isocitrate dehydrogenase | 1984 | 97 |
| | | | gamma-subunit precursor | | |
| 471 | gi4096803 | Homo sapiens | NAD+-specific isocitrate dehydrogenase gamma | 1984 | 97 |
| | | | subunit precursor | | |
| 472 | gi7459861 | Homo sapiens | Zinc finger protein ZNF45 | 845 | 35 |
| 472 | gi1160977 | Homo sapiens | zinc finger protein | 842 | 35 |
| 472 | gi6984172 | Homo sapiens | zinc finger protein ZNF226 | 819 | 36 |
| 473 | gi11074 | Drosophila | Mst84Db | 66 | 37 |
| | | melanogaster | | | |
| 473 | B44778 | Homo sapiens | Human secreted protein sequence encoded by | 62 | 32 |
| | | | gene 17 SEQ ID NO: 77. | | |
| 473 | gi6642750 | Homo sapiens | PRO0806 | 59 | 44 |
| 474 | gi9802037 | Homo sapiens | zinc finger protein SBZF3 | 2576 | 99 |
| 474 | gi4235144 | Homo sapiens | BC39498_1 | 1456 | 61 |
| 474 | gi1017722 | Homo sapiens | repressor transcriptional factor | 1380 | 57 |
| 475 | B21040 | Homo sapiens | Human nucleic acid-binding protein, NuABP-44. | 2479 | 99 |
| 475 | gi5757625 | Homo sapiens | C2H2 zinc finger protein | 1270 | 47 |
| 475 | gi3294544 | Homo sapiens | C2H2-type zinc finger protein | 1270 | 47 |
| 476 | gi12655452 | Homo sapiens | keratin associated protein 4.7 | 537 | 41 |
| 476 | gi12655460 | Homo sapiens | keratin associated protein 4.12 | 522 | 43 |
| 476 | gi12655464 | Homo sapiens | keratin associated protein 4.15 | 485 | 42 |
| 477 | Y86431 | Homo sapiens | Human gene 35-encoded protein fragment, SEQ | 230 | 94 |
| | | | ID NO: 346. | | |
| 477 | Y86430 | Homo sapiens | Human gene 35-encoded protein fragment, SEQ | 154 | 91 |
| | | | ID NO: 345. | | |
| 477 | gi4007683 | Streptomyces | putative transcriptional regulator | 85 | 30 |
| | | coelicolor | | | |
| | | A3(2) | | | |
| 478 | Y14426 | Homo sapiens | Human secreted protein encoded by gene 16 clone | 222 | 100 |
| | | | HSAVP17. | | |
| 478 | Y14481 | Homo sapiens | Fragment of human secreted protein encoded by | 79 | 100 |
| | | | gene 16. | | |
| 478 | B27647 | Homo sapiens | Human secreted protein BLAST search protein | 56 | 40 |
| | | | SEQ ID NO: 148. | | |
| 479 | gi12407395 | Homo sapiens | tripartite motif protein TRIM7 | 1169 | 100 |
| 479 | gi12407397 | Mus musculus | tripartite motif protein TRIM7 | 916 | 84 |
| 479 | gi563127 | Homo sapiens | acid finger protein | 280 | 34 |
| 480 | gi6467206 | Homo sapiens | gonadotropin inducible transcription repressor-4 | 1363 | 54 |
| 480 | Y58627 | Homo sapiens | Protein regulating gene expression PRGE-20. | 1382 | 48 |
| 480 | B52154 | Homo sapiens | Human secreted protein BLAST search protein | 1300 | 53 |
| | | | SEQ ID NO: 110. | | |
| 481 | gi1504006 | Homo sapiens | similarto human ZFY protein. | 720 | 43 |
| 481 | gi7638237 | Homo sapiens | mesenchymal stem cell protein DSC43 | 212 | 27 |
| 481 | B03946 | Homo sapiens | Human mesenchymal stem cell polypeptide. | 212 | 27 |
| 482 | G03930 | Homo sapiens | Human secreted protein, SEQ ID NO: 8011. | 97 | 50 |
| 482 | gi3116064 | Squalus | s-sgk1 | 93 | 44 |
| | | acanthias | | | |
| 482 | gi3116066 | Squalus | s-sgk2 | 92 | 27 |
| | | acanthias | | | |
| 483 | B12318 | Homo sapiens | Human secreted protein encoded by gene 18 clone | 494 | 96 |
| | | | HE2FL70. | | |
| 483 | gi2827286 | Homo sapiens | novel antagonist of FGF signaling | 73 | 36 |
| 483 | W48795 | Homo sapiens | Homo sapiens sprouty 3 protein. | 73 | 36 |
| 484 | R23732 | Homo sapiens | Gene 519 cDNA derived peptide. | 327 | 69 |
| 484 | gi35065 | Homo sapiens | NKG5 product | 325 | 67 |
| 484 | W59874 | Homo sapiens | Amino acid sequence of the cDNA clone CAT-1 | 325 | 67 |
| | | | (HTXET53). | | |
| 485 | gi607028 | Homo sapiens | putative | 201 | 31 |
| 485 | gi529680 | Rattus | rARL1 | 200 | 31 |
| | | norvegicus | | | |
| 485 | gi506475 | Rattus | ARF-like protein 1 | 200 | 31 |
| | | norvegicus | | | |
| 486 | gi388319 | Homo sapiens | CACCC box-binding protein | 324 | 49 |
| 486 | gi1724124 | Mus musculus | transcription factor BFCOL1 | 324 | 49 |
| 486 | gi2760486 | Mus musculus | G-rich box-binding protein | 324 | 49 |
| 487 | gi514215 | Chlamydomonas | dynein beta heavy chain | 200 | 23 |
| | | reinhardtii | | | |
| 487 | gi2772561 | Homo sapiens | similar to ciliary dynein beta heavy chain; 78% | 183 | 24 |
| | | | Similarity to P23098 (PID: g118965) | | |
| 487 | gi6007859 | Chlamydomonas | dynein heavy chain alpha | 188 | 27 |
| | | reinhardtii | | | |
| 488 | Y58627 | Homo sapiens | Protein regulating gene expression PRGE-20. | 1004 | 44 |
| 488 | gi3135968 | Homo sapiens | b34I8. 1 (Kruppel related Zinc Finger protein 184) | 823 | 42 |
| 488 | gi1769491 | Homo sapiens | kruppel-related zinc finger protein | 807 | 41 |

[0471] TABLE 3

| SEQ | Accession | | |
|---|---|---|---|
| ID NO: | Number | Description | Results* |
| 245 | BL01159 | WW/rsp5/WWP domain proteins. | BL01159 13.85 3.755e−10 101-116 |
| 246 | PR00450 | RECOVERIN FAMILY SIGNATURE | PR00450C 12.22 1.818e−12 236-258 |
| 247 | PR00659 | CHROMOGRANIN SIGNATURE | PR00659B 13.09 9.746e−09 539-555 |
| 248 | BL00115 | Eukaryotic RNA polymerase II | BL00115Z 3.12 4.176e−09 312-361 |
| | | heptapeptide repeat proteins. | |
| 249 | BL00904 | Protein prenyltransferases alpha subunit | BL00904A 8.30 1.574e−09 628-678 |
| | | repeat proteins proteins. | |
| 250 | PR00489 | FRIZZLED PROTEIN SIGNATURE | PR00489C 9.29 2.250e−28 398-423 |
| | | | PR00489E 9.95 4.808e−25 486-509 |
| | | | PR00489G 8.99 6.478e−25 585-606 |
| | | | PR00489B 13.69 4.273e−24 308-331 |
| | | | PR00489A 11.81 7.353e−24 280-303 |
| | | | PR00489D 15.68 2.703e−22 441-465 |
| | | | PR00489F 14.55 1.675e−21 529-551 |
| 251 | PR00315 | GTP-BINDING ELONGATION | PR00315A 11.81 8.000e−14 70-84 |
| | | FACTOR SIGNATURE | PR00315C 13.85 3.250e−12 137-148 |
| 253 | PF00614 | Phospholipase D. Active site proteins | PF00614B 14.45 3.294e−09 200-220 |
| | | motifs. | |
| 254 | BL50002 | Src homology 3 (SH3) domain proteins | BL50002A 14.19 4.750e−12 332-351 |
| | | profile. | |
| 256 | BL50002 | Src homology 3 (SH3) domain proteins | BL50002B 15.18 5.200e−10 693-707 |
| | | profile. | |
| 258 | PD00930 | PROTEIN GTPASE DOMAIN | PD00930B 33.72 2.098e−20 137-178 |
| | | ACTIVATION. | |
| 259 | BL00107 | Protein kinases ATP-binding region | BL00107B 13.31 1.000e−14 329-345 |
| | | proteins. | |
| 260 | BL00790 | Receptor tyrosine kinase class V proteins. | BL00790B 21.59 1.000e−40 62-114 |
| | | | BL00790C 16.65 1.000e−40 166-220 |
| | | | BL00790E 29.58 1.000e−40 276-324 |
| | | | BL00790G 22.06 1.000e−40 379-423 |
| | | | BL00790J 14.21 1.000e−40 603-643 |
| | | | BL00790K 9.30 1.000e−40 655-709 |
| | | | BL00790O 7.68 1.000e−40 795-828 |
| | | | BL00790R 16.20 1.000e−40 891-935 |
| | | | BL00790N 13.25 7.618e−33 761-788 |
| | | | BL00790I 20.01 4.094e−28 504-535 |
| | | | BL00790D 12.41 2.125e−27 246-271 |
| | | | BL00790H 13.42 2.957e−27 458-484 |
| | | | BL00790M 8.74 3.483e−27 739-761 |
| | | | BL00790L 11.16 2.350e−25 719-739 |
| | | | BL00790F 15.90 6.143e−25 342-369 |
| | | | BL00790A 19.74 2.688e−18 32-54 |
| | | | BL00790P 12.33 1.261e−16 828-853 |
| 261 | BL00471 | Small cytokines (intercrine/chemokine) | BL00471 23.92 1.000e−40 72-120 |
| | | C-x-C subfamily signat. | |
| 262 | PD00126 | PROTEIN REPEAT DOMAIN TPR | PD00126A 22.53 3.483e−09 87-108 |
| | | NUCLEA. | |
| 263 | PR00360 | C2 DOMAIN SIGNATURE | PR00360A 14.59 8.839e−10 57-70 |
| | | | PR00360B 13.61 3.455e−09 82-96 |
| 264 | PR00499 | NEUTROPHIL CYTOSOL FACTOR 2 | PR00499D 10.18 1.875e−12 269-290 |
| | | SIGNATURE | |
| 265 | BL01160 | Kinesin light chain repeat proteins. | BL01160F 9.68 8.161e−21 399-440 |
| | | | BL01160F 9.68 6.243e−17 291-332 |
| | | | BL01160E 8.74 6.938e−17 484-523 |
| | | | BL01160E 8.74 5.140e−16 442-481 |
| | | | BL01160E 8.74 7.300e−16 400-439 |
| | | | BL01160E 8.74 3.972e−14 250-289 |
| | | | BL01160E 8.74 5.075e−14 526-565 |
| | | | BL01160F 9.68 2.017e−13 483-524 |
| | | | BL01160F 9.68 4.913e−13 249-290 |
| | | | BL01160F 9.68 6.009e−13 525-566 |
| | | | BL01160E 8.74 7.300e−13 292-331 |
| | | | BL01160C 2.94 1.354e−12 366-413 |
| | | | BL01160G 13.67 2.948e−12 398-425 |
| | | | BL01160F 9.68 6.067e−12 441-482 |
| | | | BL01160F 9.68 6.748e−12 357-398 |
| | | | BL01160G 13.67 1.089e−11 248-275 |
| | | | BL01160G 13.67 4.653e−11 524-551 |
| | | | BL01160C 2.94 7.614e−11 258-305 |
| | | | BL01160E 8.74 9.773e−11 358-397 |
| | | | BL01160G 13.67 4.600e−10 440-467 |
| | | | BL01160C 2.94 4.971e−10 450-497 |
| | | | BL01160I 12.96 7.165e−10 525-573 |
| | | | BL01160I 12.96 9.575e−10 441-489 |
| | | | BL01160C 2.94 1.503e−09 492-539 |
| | | | BL01160G 13.67 4.436e−09 356-383 |
| | | | BL01160G 13.67 5.909e−09 482-509 |
| | | | BL01160I 12.96 8.241e−09 399-447 |
| | | | BL01160I 12.96 9.797e−09 483-531 |
| 266 | PF00646 | F-box domain proteins. | PF00646A 14.37 3.893e−10 75-89 |
| 269 | PF00642 | Zinc finger C-x8-C-x5-C-x3-H type (and | PF00642 11.59 4.673e−10 312-323 |
| | | similar). | |
| 270 | PR00109 | TYROSINE KINASE CATALYTIC | PR00109B 12.27 5.059e−12 1198-1217 |
| | | DOMAIN SIGNATURE | |
| 271 | BL00107 | Protein kinases ATP-binding region | BL00107A 18.39 8.650e−17 356-387 |
| | | proteins. | |
| 272 | BL00678 | Trp-Asp (WD) repeat proteins proteins. | BL00678 9.67 8.615e−11 1038-1049 |
| | | | BL00678 9.67 9.400e−10 1338-1349 |
| | | | BL00678 9.67 1.474e−09 952-963 |
| | | | BL00678 9.67 3.842e−09 1177-1188 |
| | | | BL00678 9.67 6.684e−09 1380-1391 |
| 273 | BL00678 | Trp-Asp (WD) repeat proteins proteins. | BL00678 9.67 8.615e−11 711-722 |
| | | | BL00678 9.67 9.400e−10 1011-1022 |
| | | | BL00678 9.67 1.474e−09 625-636 |
| | | | BL00678 9.67 3.842e−09 850-861 |
| | | | BL00678 9.67 6.684e−09 1053-1064 |
| 274 | BL01290 | Enhancer of rudimentary proteins. | BL01290B 17.01 4.231e−39 39-79 |
| | | | BL01290A 11.13 6.226e−19 21-50 |
| 276 | BL00678 | Trp-Asp (WD) repeat proteins proteins. | BL00678 9.67 3.769e−11 134-145 |
| 278 | PR00449 | TRANSFORMING PROTEIN P21 RAS | PR00449A 13.20 9.206e−14 5-27 |
| | | SIGNATURE | PR00449D 10.79 6.276e−10 119-133 |
| 280 | PF00791 | Domain present in ZO-1 and Unc5-like | PF00791B 28.49 9.053e−12 821-876 |
| | | netrin receptors. | |
| 281 | PF00791 | Domain present in ZO-1 and Unc5-like | PF00791B 28.49 9.053e−12 773-828 |
| | | netrin receptors. | |
| 282 | PF00791 | Domain present in ZO-1 and Unc5-like | PF00791B 28.49 9.053e−12 796-851 |
| | | netrin receptors. | |
| 286 | BL00107 | Protein kinases ATP-binding region | BL00107A 18.39 1.000e−23 262-293 |
| | | proteins. | BL00107B 13.31 1.692e−12 328-344 |
| 287 | PR00450 | RECOVERIN FAMILY SIGNATURE | PR00450C 12.22 6.280e−10 370-392 |
| 290 | BL00720 | Guanine-nucleotide dissociation | BL00720B 16.57 9.419e−17 156-180 |
| | | stimulators CDC25 family sign. | |
| 291 | PF00566 | Probable rabGAP domain proteins. | PF00566A 12.64 7.333e−10 547-557 |
| 292 | PR00449 | TRANSFORMING PROTEIN P21 RAS | PR00449A 13.20 5.846e−21 12-34 |
| | | SIGNATURE | PR00449E 13.50 6.684e−17 118-141 |
| | | | PR00449D 10.79 3.368e−13 83-97 |
| | | | PR00449B 14.34 5.500e−13 35-52 |
| 293 | PR00109 | TYROSINE KINASE CATALYTIC | PR00109B 12.27 2.068e−10 396-415 |
| | | DOMAIN SIGNATURE | |
| 294 | DM01970 | 0 kw ZK632.12 YDR313C | DM01970B 8.60 3.898e−15 477-490 |
| | | ENDOSOMAL III. | |
| 295 | PF00791 | Domain present in ZO-1 and Unc5-like | PF00791C 20.98 1.222e−14 423-462 |
| | | netrin receptors. | PF00791D 20.37 7.476e−14 466-509 |
| | | | PF00791A 27.85 9.308e−13 74-129 |
| 297 | BL00678 | Trp-Asp (WD) repeat proteins proteins. | BL00678 9.67 1.947e−09 398-409 |
| 298 | BL00678 | Trp-Asp (WD) repeat proteins proteins. | BL00678 9.67 1.947e−09 366-377 |
| 299 | PR00308 | TYPE I ANTIFREEZE PROTEIN | PR00308B 4.28 2.075e−10 39-51 |
| | | SIGNATURE | PR00308C 3.83 9.182e−09 39-49 |
| 300 | BL00434 | HSF-type DNA-binding domain proteins. | BL00434C 23.85 6.556e−09 128-168 |
| 302 | PR00048 | C2H2-TYPE ZINC FINGER | PR00048A 10.52 1.000e−12 337-351 |
| | | SIGNATURE | |
| 303 | PD00126 | PROTEIN REPEAT DOMAIN TPR | PD00126A 22.53 3.423e−10 92-113 |
| | | NUCLEA. | PD00126A 22.53 8.448e−09 160-181 |
| 304 | PR00049 | WILM'S TUMOR PROTEIN | PR00049D 0.00 3.898e−09 75-90 |
| | | SIGNATURE | |
| 305 | BL01187 | Calcium-binding EGF-like domain | BL01187B 12.04 7.300e−14 198-214 |
| | | proteins pattern proteins. | |
| 307 | BL00479 | Phorbol esters/diacylglycerol binding | BL00479A 19.86 5.091e−12 841-864 |
| | | domain proteins. | BL00479B 12.57 1.837e−11 865-881 |
| 308 | BL00678 | Trp-Asp (WD) repeat proteins proteins. | BL00678 9.67 9.308e−11 109-120 |
| 309 | BL01187 | Calcium-binding EGF-like domain | BL01187B 12.04 6.250e−17 563-579 |
| | | proteins pattern proteins. | |
| 311 | PR00109 | TYROSINE KINASE CATALYTIC | PR00109B 12.27 7.706e−12 88-107 |
| | | DOMAIN SIGNATURE | |
| 312 | PR00918 | CALICIVIRUS NON-STRUCTURAL | PR00918A 13.76 4.923e−11 192-213 |
| | | POLYPROTEIN FAMILY SIGNATURE | |
| 314 | PR00109 | TYROSINE KINASE CATALYTIC | PR00109B 12.27 5.255e−11 410-429 |
| | | DOMAIN SIGNATURE | |
| 315 | DM00215 | PROLINE-RICH PROTEIN 3. | DM00215 19.43 7.107e−10 1229-1262 |
| 316 | PF00791 | Domain present in ZO-1 and Unc5-like | PF00791C 20.98 1.614e−12 217-256 |
| | | netrin receptors. | PF00791B 28.49 4.320e−10 203-258 |
| 317 | PR00806 | VINCULIN SIGNATURE | PR00806B 4.28 2.440e−09 393-407 |
| 318 | PR00834 | HTRA/DEGQ PROTEASE FAMILY | PR00834F 10.91 6.700e−10 547-560 |
| | | SIGNATURE | |
| 319 | PR00320 | G-PROTEIN BETA WD-40 REPEAT | PR00320A 16.74 1.000e−11 428-443 |
| | | SIGNATURE | PR00320C 13.01 4.522e−11 428-443 |
| | | | PR00320B 12.19 9.710e−11 428-443 |
| 321 | BL00479 | Phorbol esters/diacylglycerol binding | BL00479B 12.57 1.931e−13 145-161 |
| | | domain proteins. | |
| 323 | BL01159 | WW/rsp5/WWP domain proteins. | BL01159 13.85 6.510e−10 27-42 |
| 324 | PR00264 | INTERLEUKIN-1 SIGNATURE | PR00264B 20.98 8.453e−11 77-104 |
| | | | PR00264C 17.77 1.851e−10 117-146 |
| 325 | PF00791 | Domain present in ZO-1 and Unc5-like | PF00791B 28.49 4.727e−11 97-152 |
| | | netrin receptors. | |
| 326 | PR00109 | TYROSINE KINASE CATALYTIC | PR00109B 12.27 5.582e−11 219-238 |
| | | DOMAIN SIGNATURE | |
| 327 | PR00320 | G-PROTEIN BETA WD-40 REPEAT | PR00320C 13.01 3.160e−10 280-295 |
| | | SIGNATURE | PR00320A 16.74 5.765e−10 280-295 |
| 329 | PF00168 | C2 domain proteins. | PF00168C 27.49 8.941e−13 362-388 |
| 331 | BL00303 | S-100/ICaBP type calcium binding | BL00303A 21.77 7.375e−16 137-174 |
| | | protein. | BL00303B 26.15 8.676e−09 183-220 |
| 332 | PR00109 | TYROSINE KINASE CATALYTIC | PR00109B 12.27 8.116e−14 62-81 |
| | | DOMAIN SIGNATURE | |
| 333 | PR00109 | TYROSINE KINASE CATALYTIC | PR00109B 12.27 8.116e−14 62-81 |
| | | DOMAIN SIGNATURE | |
| 334 | BL00107 | Protein kinases ATP-binding region | BL00107A 18.39 6.625e−21 567-598 |
| | | proteins. | BL00107A 18.39 1.783e−14 144-175 |
| 335 | BL00107 | Protein kinases ATP-binding region | BL00107A 18.39 8.412e−20 1403-1434 |
| | | proteins. | BL00107B 13.31 9.308e−12 |
| | | | 1475-1491 |
| 336 | PR00405 | HIV REV INTERACTING PROTEIN | PR00405A 17.71 4.396e−13 184-204 |
| | | SIGNATURE | PR00405B 11.83 9.842e−11 203-221 |
| 337 | BL00107 | Protein Kinases ATP-binding region | BL00107A 18.39 3.813e−21 549-580 |
| | | proteins. | BL00107B 13.31 1.692e−12 614-630 |
| 338 | PR00377 | INOSITOL | PR00377C 11.91 3.388e−10 593-608 |
| | | PHOSPHATASE/FRUCTOSE-1,6- | |
| | | BISPHOSPHATASE FAMILY | |
| | | SIGNATURE | |
| 341 | PR00449 | TRANSFORMING PROTEIN P21 RAS | PR00449A 13.20 1.466e−09 144-166 |
| | | SIGNATURE | |
| 342 | PF00023 | Ank repeat proteins. | PF00023A 16.03 8.875e−10 359-375 |
| 343 | PD00289 | PROTEIN SH3 DOMAIN REPEAT | PD00289 9.97 3.160e−10 837-851 |
| | | PRESYNA. | |
| 344 | PD00078 | REPEAT PROTEIN ANK NUCLEAR | PD00078B 13.14 9.550e−10 400-413 |
| | | ANKYR. | |
| 345 | PD00078 | REPEAT PROTEIN ANK NUCLEAR | PD00078B 13.14 9.550e−10 400-413 |
| | | ANKYR. | PD00078B 13.14 2.174e−09 466-479 |
| 346 | PD00078 | REPEAT PROTEIN ANK NUCLEAR | PD00078B 13.14 5.950e−10 714-727 |
| | | ANKYR. | |
| 347 | BL00790 | Receptor tyrosine kinase class V proteins. | BL00790E 29.58 7.964e−11 526-574 |
| 349 | BL00107 | Protein kinases ATP-binding region | BL00107B 13.31 5.154e−12 190-206 |
| | | proteins. | BL00107A 18.39 8.759e−11 124-155 |
| 351 | BL00303 | S-100/ICaBP type calcium binding | BL00303A 21.77 7.375e−16 3-40 |
| | | protein. | BL00303B 26.15 8.676e−09 49-86 |
| 352 | BL00790 | Receptor tyrosine kinase class V proteins. | BL00790R 16.20 6.400e−12 579-623 |
| | | | BL00790R 16.20 1.536e−11 509-553 |
| 353 | PR00750 | BETA-AMYLASE (GLYCOSYL | PR00750F 13.15 9.620e−09 201-218 |
| | | HYDROLASE FAMILY 14) | |
| | | SIGNATURE | |
| 354 | PR00109 | TYROSINE KINASE CATALYTIC | PR00109B 12.27 8.116e−14 138-157 |
| | | DOMAIN SIGNATURE | |
| 355 | PR00259 | TRANSMEMBRANE FOUR FAMILY | PR00259A 9.27 9.100e−12 12-36 |
| | | SIGNATURE | PR00259C 16.40 7.164e−10 80-109 |
| 356 | PR00319 | BETA G-PROTEIN (TRANSDUCIN) | PR00319B 11.47 4.714e−09 126-141 |
| | | SIGNATURE | |
| 358 | PF00168 | C2 domain proteins. | PF00168C 27.49 1.643e−15 475-501 |
| 359 | PR00109 | TYROSINE KINASE CATALYTIC | PR00109B 12.27 6.362e−13 492-511 |
| | | DOMAIN SIGNATURE | |
| 360 | PR00563 | BETA-3 ADRENERGIC RECEPTOR | PR00563E 7.48 3.084e−09 180-199 |
| | | SIGNATURE | |
| 361 | BL00107 | Protein kinases ATP-binding region | BL00107A 18.39 2.200e−22 838-869 |
| | | proteins. | BL00107A 18.39 1.783e−14 415-446 |
| 362 | PR00320 | G-PROTEIN BETA WD-40 REPEAT | PR00320C 13.01 7.652e−11 58-73 |
| | | SIGNATURE | PR00320B 12.19 2.543e−10 58-73 |
| | | | PR00320A 16.74 5.765e−10 58-73 |
| | | | PR00320B 12.19 6.400e−09 144-159 |
| | | | PR00320A 16.74 8.683e−09 144-159 |
| 364 | PR00319 | BETA G-PROTEIN (TRANSDUCIN) | PR00319A 15.27 3.803e−09 187-204 |
| | | SIGNATURE | |
| 365 | BL00107 | Protein kinases ATP-binding region | BL00107B 13.31 2.636e−13 663-679 |
| | | proteins. | BL00107A 18.39 9.280e−13 597-628 |
| 366 | PR00453 | VON WILLEBRAND FACTOR TYPE | PR00453A 12.79 6.684e−17 614-632 |
| | | A DOMAIN SIGNATURE | PR00453B 14.65 4.545e−12 659-674 |
| | | | PR00453C 12.26 9.000e−09 726-735 |
| 367 | PR00109 | TYROSINE KINASE CATALYTIC | PR00109B 12.27 6.651e−14 187-206 |
| | | DOMAIN SIGNATURE | |
| 368 | BL01013 | Oxysterol-binding protein family | BL01013D 26.81 6.081e−18 850-894 |
| | | proteins. | BL01013A 25.14 1.148e−17 580-616 |
| | | | BL01013C 9.97 4.231e−13 668-678 |
| | | | BL01013B 11.33 3.017e−11 646-657 |
| 369 | PF00595 | PDZ domain proteins (Also known as | PF00595 13.40 1.600e−09 502-513 |
| | | DHR or GLGF). | |
| 370 | PD00078 | REPEAT PROTEIN ANK NUCLEAR | PD00078B 13.14 9.550e−10 978-991 |
| | | ANKYR. | PD00078B 13.14 2.174e−09 1044-1057 |
| 371 | PD00301 | PROTEIN REPEAT MUSCLE | PD00301B 5.49 4.115e−09 95-106 |
| | | CALCIUM-BI. | |
| 372 | PF00791 | Domain present in ZO-1 and Unc5-like | PF00791B 28.49 8.261e−14 748-803 |
| | | netrin receptors. | PF00791B 28.49 1.364e−11 814-869 |
| | | | PF00791C 20.98 4.913e−11 795-834 |
| | | | PF00791C 20.98 3.029e−09 762-801 |
| | | | PF00791B 28.49 3.477e−09 715-770 |
| 373 | BL01013 | Oxysterol-binding protein family | BL01013A 25.14 1.500e−20 488-524 |
| | | proteins. | BL01013D 26.81 6.516e−18 758-802 |
| | | | BL01013C 9.97 1.000e−13 576-586 |
| | | | BL01013B 11.33 3.017e−11 554-565 |
| 375 | PR00401 | SH2 DOMAIN SIGNATURE | PR00401B 12.94 8.200e−11 143-154 |
| | | | PR00401A 14.00 3.025e−09 126-141 |
| 376 | PD00930 | PROTEIN GTPASE DOMAIN | PD00930A 25.62 6.523e−13 113-139 |
| | | ACTIVATION. | |
| 377 | BL00535 | Respiratory chain NADH dehydrogenase | BL00535A 22.06 1.000e−40 86-141 |
| | | 49 Kd subunit proteins. | BL00535C 22.70 5.345e−40 190-236 |
| | | | BL00535D 27.70 1.818e−39 245-293 |
| | | | BL00535E 14.99 4.150e−33 298-330 |
| | | | BL00535F 19.62 5.500e−33 371-408 |
| | | | BL00535B 22.59 6.000e−28 156-190 |
| 378 | PR00058 | RIBOSOMAL PROTEIN L5 | PR00058F 8.67 6.400e−28 60-81 |
| | | SIGNATURE | |
| 379 | BL01215 | Mrp family proteins. | BL01215C 18.97 5.154e−35 154-196 |
| | | | BL01215D 30.07 6.308e−31 210-260 |
| | | | BL01215A 9.75 6.400e−25 66-93 |
| | | | BL01215B 9.34 6.860e−12 101-114 |
| 380 | PR00189 | TRANSTHYRETIN SIGNATURE | PR00189C 10.36 1.692e−39 72-102 |
| | | | PR00189D 5.14 1.000e−28 102-125 |
| | | | PR00189A 10.47 1.310e−26 31-52 |
| 387 | PD01307 | LIGASE CARBOXYLASE ACETYL- | PD01307B 24.35 7.750e−25 383-427 |
| | | COENZY. | |
| 390 | BL00766 | Tetrahydrofolate | BL00766B 24.49 1.000e−40 108-156 |
| | | dehydrogenase/cyclohydrolase proteins. | BL00766E 13.78 1.000e−40 288-325 |
| | | | BL00766C 25.86 5.500e−39 174-222 |
| | | | BL00766D 17.05 4.536e−26 249-279 |
| | | | BL00766A 21.48 6.063e−24 68-98 |
| 393 | BL01273 | CoA transferases proteins. | BL01273C 12.54 1.000e−40 130-170 |
| | | | BL01273D 19.11 9.750e−37 206-250 |
| | | | BL01273B 14.85 9.830e−20 81-115 |
| | | | BL01273A 12.56 2.286e−16 62-75 |
| 394 | BL00272 | Snake toxins proteins. | BL00272C 8.27 8.953e−09 117-129 |
| 397 | BL01241 | Link domain proteins. | BL01241 35.81 1.237e−37 165-218 |
| | | | BL01241 35.81 5.974e−15 261-314 |
| 399 | BL00279 | Membrane attack complex components/ | BL00279C 31.64 6.063e−09 108-162 |
| | | perforin proteins. | |
| 404 | BL00477 | Alpha-2-macroglobulin family thiolester | BL00477A 13.50 9.690e−18 131-160 |
| | | region proteins. | BL00477C 15.70 9.538e−14 246-263 |
| | | | BL00477B 9.05 9.250e−13 219-232 |
| 406 | BL01176 | Initiation factor 2 proteins. | BL01176B 8.74 6.380e−13 116-154 |
| 407 | DM01554 | 1 THYROLIBERIN PRECURSOR. | DM01554A 6.07 6.118e−09 1-11 |
| 409 | BL00086 | Cytochrome P450 cysteine heme-iron | BL00086 20.87 2.588e−23 458-490 |
| | | ligand proteins. | |
| 410 | PR00007 | COMPLEMENT C1Q DOMAIN | PR00007C 15.60 2.000e−16 240-262 |
| | | SIGNATURE | PR00007B 14.16 1.771e−15 196-216 |
| | | | PR00007A 19.33 4.064e−13 169-196 |
| | | | PR00007D 9.64 4.349e−09 275-286 |
| 411 | PR00007 | COMPLEMENT C1Q DOMAIN | PR00007C 15.60 3.631e−09 258-280 |
| | | SIGNATURE | |
| 412 | PR00007 | COMPLEMENT C1Q DOMAIN | PR00007C 15.60 2.000e−16 285-307 |
| | | SIGNATURE | PR00007B 14.16 1.771e−15 241-261 |
| | | | PR00007A 19.33 9.143e−15 214-241 |
| | | | PR00007D 9.64 4.349e−09 320-331 |
| 413 | PR00007 | COMPLEMENT C1Q DOMAIN | PR00007C 15.60 2.000e−16 258-280 |
| | | SIGNATURE | PR00007D 9.64 4.349e−09 293-304 |
| 415 | PD01066 | PROTEIN ZINC FINGER ZINC- | PD01066 19.43 3.739e−19 280-319 |
| | | FINGER METAL-BINDING NU. | |
| 416 | PR00019 | LEUCINE-RICH REPEAT | PR00019A 11.19 4.667e−09 185-199 |
| | | SIGNATURE | PR00019A 11.19 6.667e−09 111-125 |
| | | | PR00019B 11.36 1.000e−08 182-196 |
| 417 | BL01254 | Fetuin family proteins. | BL01254B 14.36 1.000e−40 78-124 |
| | | | BL01254D 16.81 1.000e−40 158-205 |
| | | | BL01254A 14.53 1.000e−39 32-69 |
| | | | BL01254E 13.25 3.250e−28 292-321 |
| | | | BL01254C 13.84 7.648e−18 107-158 |
| | | | BL01254F 10.02 2.440e−13 340-350 |
| 418 | BL01254 | Fetuin family proteins. | BL01254B 14.36 1.000e−40 78-124 |
| | | | BL01254C 13.84 1.000e−40 125-176 |
| | | | BL01254D 16.81 1.000e−40 176-223 |
| | | | BL01254A 14.53 1.000e−39 32-69 |
| | | | BL01254E 13.25 1.659e−24 310-339 |
| | | | BL01254F 10.02 2.440e−13 340-350 |
| 419 | BL01254 | Fetuin family proteins. | BL01254B 14.36 1.000e−40 60-106 |
| | | | BL01254C 13.84 1.000e−40 107-158 |
| | | | BL01254D 16.81 1.000e−40 158-205 |
| | | | BL01254E 13.25 3.250e−28 292-321 |
| | | | BL01254F 10.02 2.440e−13 340-350 |
| | | | BL01254A 14.53 5.133e−11 32-69 |
| 420 | BL00072 | Acyl-CoA dehydrogenases proteins. | BL00072C 25.30 8.425e−27 253-294 |
| | | | BL00072E 24.12 3.600e−24 396-439 |
| | | | BL00072D 30.08 5.105e−20 307-358 |
| | | | BL00072B 9.48 1.600e−16 205-218 |
| | | | BL00072A 12.45 6.786e−11 104-115 |
| 422 | BL00514 | Fibrinogen beta and gamma chains C- | BL00514C 17.41 4.414e−23 175-212 |
| | | terminal domain proteins. | BL00514G 15.98 1.000e−14 302-332 |
| | | | BL00514H 14.95 7.545e−13 337-362 |
| | | | BL00514D 15.35 3.118e−11 216-229 |
| 423 | BL00290 | Immunoglobulins and major | BL00290B 13.17 1.500e−12 230-248 |
| | | histocompatibility complex proteins. | BL00290A 20.89 1.900e−12 174-197 |
| 424 | PF00094 | von Willebrand factor type D domain | PF00094B 10.43 6.400e−17 491-509 |
| | | proteins. | |
| 425 | BL00420 | Speract receptor repeat proteins domain | BL00420B 22.67 5.500e−29 311-366 |
| | | proteins. | BL00420B 22.67 5.442e−24 49-104 |
| | | | BL00420C 11.90 7.840e−13 134-145 |
| | | | BL00420B 22.67 3.972e−12 180-235 |
| | | | BL00420C 11.90 8.017e−11 396-407 |
| 426 | PD02327 | GLYCOPROTEIN ANTIGEN | PD02327B 19.84 3.864e−09 51-73 |
| | | PRECURSOR IMMUNOGLO. | |
| 427 | PR00179 | LIPOCALIN SIGNATURE | PR00179A 13.78 5.680e−10 37-50 |
| 432 | BL00086 | Cytochrome P450 cysteine heme-iron | BL00086 20.87 9.500e−22 432-464 |
| | | ligand proteins. | |
| 433 | PR00792 | PEPSIN (A1) ASPARTIC PROTEASE | PR00792A 11.54 4.273e−24 113-134 |
| | | FAMILY SIGNATURE | PR00792D 12.74 5.000e−17 411-427 |
| | | | PR00792C 9.10 1.000e−11 320-332 |
| | | | PR00792B 12.78 4.682e−11 271-285 |
| 435 | PR00211 | GLUTELIN SIGNATURE | PR00211B 0.86 5.413e−10 682-703 |
| | | | PR00211B 0.86 3.167e−09 688-709 |
| 439 | PR00343 | SELECTIN SUPERFAMILY | PR00343A 13.78 9.578e−09 72-92 |
| | | COMPLEMENT-BINDING REPEAT | |
| | | SIGNATURE | |
| 440 | BL00982 | Bacterial-type phytoene dehydrogenase | BL00982A 18.41 8.644e−13 34-66 |
| | | proteins. | |
| 441 | DM00934 | kw DIHYDROFLAVONOL YOL151W | DM00934A 20.07 5.784e−09 98-146 |
| | | YDR541C YGL157W. | |
| 443 | PD01066 | PROTEIN ZINC FINGER ZINC- | PD01066 19.43 3.182e−36 10-49 |
| | | FINGER METAL-BINDING NU. | |
| 450 | PD01066 | PROTEIN ZINC FINGER ZINC- | PD01066 19.43 1.667e−40 10-49 |
| | | FINGER METAL-BINDING NU. | |
| 456 | PD01066 | PROTEIN ZINC FINGER ZINC- | PD01066 19.43 3.531e−37 45-84 |
| | | FINGER METAL-BINDING NU. | |
| 458 | BL00227 | Tubulin subunits alpha, beta, and gamma | BL00227A 24.55 4.536e−31 10-44 |
| | | proteins. | |
| 459 | BL01208 | VWFC domain proteins. | BL01208B 15.83 5.235e−14 3-18 |
| 461 | BL01188 | GNS1/SUR4 family proteins. | BL01188C 22.65 5.333e−10 169-220 |
| | | | BL01188D 8.62 1.247e−09 254-271 |
| 462 | BL00227 | Tubulin subunits alpha, beta, and gamma | BL00227A 24.55 5.135e−26 17-51 |
| | | proteins. | |
| 463 | PD00066 | PROTEIN ZINC-FINGER METAL- | PD00066 13.92 4.600e−14 674-687 |
| | | BINDI. | PD00066 13.92 5.200e−14 702-715 |
| | | | PD00066 13.92 5.800e−14 394-407 |
| | | | PD00066 13.92 5.800e−14 562-575 |
| | | | PD00066 13.92 6.400e−14 478-491 |
| | | | PD00066 13.92 6.400e−14 618-631 |
| | | | PD00066 13.92 1.500e−13 366-379 |
| | | | PD00066 13.92 5.000e−13 590-603 |
| | | | PD00066 13.92 7.000e−13 730-743 |
| | | | PD00066 13.92 1.000e−12 450-463 |
| | | | PD00066 13.92 2.286e−12 534-547 |
| | | | PD00066 13.92 5.286e−12 758-771 |
| | | | PD00066 13.92 8.962e−10 422-435 |
| 465 | PD02283 | PROTEIN SPORULATION REPEAT | PD02283C 17.54 4.713e−09 98-126 |
| | | PRECU. | |
| 466 | PD01066 | PROTEIN ZINC FINGER ZINC- | PD01066 19.43 3.750e−35 6-45 |
| | | FINGER METAL-BINDING NU. | |
| 469 | BL00521 | Delta 1-pyrroline-5-carboxylate reductase | BL00521A 10.16 3.919e−11 3-19 |
| | | proteins. | BL00521B 10.93 6.400e−11 62-74 |
| 470 | PD01066 | PROTEIN ZINC FINGER ZINC- | PD01066 19.43 6.200e−30 105-144 |
| | | FINGER METAL-BINDING NU. | |
| 471 | BL00470 | Isocitrate and isopropylmalate | BL00470D 21.75 8.500e−13 269-300 |
| | | dehydrogenases proteins. | BL00470C 15.43 4.375e−11 162-177 |
| | | | BL00470A 16.25 6.077e−11 57-78 |
| 472 | PD01066 | PROTEIN ZINC FINGER ZINC- | PD01066 19.43 1.305e−23 10-49 |
| | | FINGER METAL-BINDING NU. | |
| 474 | PD01066 | PROTEIN ZINC FINGER ZINC- | PD01066 19.43 1.844e−37 6-45 |
| | | FINGER METAL-BINDING NU. | |
| 475 | PD01066 | PROTEIN ZINC FINGER ZINC- | PD01066 19.43 4.000e−30 16-55 |
| | | FINGER METAL-BINDING NU. | |
| 476 | BL01208 | VWFC domain proteins. | BL01208B 15.83 4.162e−09 199-214 |
| 479 | BL00518 | Zinc finger, C3HC4 type (RING finger), | BL00518 12.23 5.800e−11 44-53 |
| | | proteins. | |
| 480 | PD01066 | PROTEIN ZINC FINGER ZINC- | PD01066 19.43 4.255e−29 6-45 |
| | | FINGER METAL-BINDING NU. | |
| 481 | BL00028 | Zinc finger, C2H2 type, domain proteins. | BL00028 16.07 4.300e−10 583-600 |
| 485 | BL01019 | ADP-ribosylation factors family proteins. | BL01019B 19.49 5.970e−17 80-135 |
| 486 | PD00066 | PROTEIN ZINC-FINGER METAL- | PD00066 13.92 2.200e−14 147-160 |
| | | BINDI. | PD00066 13.92 6.087e−11 119-132 |
| 488 | PD01066 | PROTEIN ZINC FINGER ZINC- | PD01066 19.43 7.600e−30 6-45 |
| | | FINGER METAL-BINDING NU. | |

*Results include in order: accession number subtype; raw score; p-value; position of signature in amino acid sequence

[0472] TABLE 4

| SEQ ID | | | | Pfam |
|---|---|---|---|---|
| NO: | Pfam Model | Description | e-value | Score |
| 245 | WW | WW domain | 4.9e−08 | 40.1 |
| 246 | efhand | EF hand | 0.0023 | 24.6 |
| 248 | PC_rep | Proteasome/cyclosome repeat | 0.00016 | 28.5 |
| 249 | PH | PH domain | 2.8e−15 | 59.6 |
| 250 | Frizzled | Frizzled/Smoothened family membrane region | 7.6e−226 | 758.6 |
| 251 | GTP_EFTU | Elongation factor Tu family | 9.5e−103 | 354.8 |
| 252 | ThiJ | ThiJ/PfpI family | 2.1e−54 | 194.2 |
| 253 | PLDc | Phospholipase D. Active site motif | 0.0098 | 22.5 |
| 254 | SH3 | SH3 domain | 6.8e−20 | 79.5 |
| 255 | Synuclein | Synuclein | 1.8e−77 | 270.8 |
| 256 | RhoGAP | RhoGAP domain | 3.3e−39 | 143.7 |
| 257 | ThiJ | ThiJ/PfpI family | 6.1e−45 | 162.7 |
| 258 | RhoGAP | RhoGAP domain | 5.3e−47 | 169.6 |
| 259 | pkinase | Eukaryotic protein kinase domain | 3.2e−94 | 326.5 |
| 260 | EPH_lbd | Ephrin receptor ligand binding domain | 1.1e−140 | 480.7 |
| 261 | IL8 | Small cytokines (intecrine/chemokine), interleukin-8 like | 3.7e−36 | 124.9 |
| 262 | TPR | TPR Domain | 9.4e−07 | 35.9 |
| 263 | C2 | C2 domain | 4e−18 | 73.7 |
| 264 | SH3 | SH3 domain | 2.9e−22 | 87.4 |
| 265 | TPR | TPR Domain | 1.1e−38 | 141.9 |
| 266 | F-box | F-box domain. | 0.004 | 23.8 |
| 267 | PH | PH domain | 2.5e−22 | 84.4 |
| 268 | DEP | Domain found in Dishevelled, Egl-10, and Pleckstrin | 7e−22 | 86.1 |
| 270 | pkinase | Eukaryotic protein kinase domain | 5.9e−81 | 282.4 |
| 271 | pkinase | Eukaryotic protein kinase domain | 2.1e−30 | 113.6 |
| 272 | NB-ARC | NB-ARC domain | 8e−112 | 384.9 |
| 273 | NB-ARC | NB-ARC domain | 8e−112 | 384.9 |
| 274 | ER | Enhancer of rudimentary | 2.3e−59 | 210.6 |
| 275 | PH | PH domain | 4.5e−10 | 40.9 |
| 276 | WD40 | WD domain, G-beta repeat | 6.3e−06 | 33.1 |
| 277 | RhoGAP | RhoGAP domain | 3e−24 | 94.0 |
| 278 | ras | Ras family | 1.2e−12 | 7.0 |
| 279 | START | START domain | 0.00075 | 24.2 |
| 280 | ank | Ank repeat | 4.7e−19 | 76.7 |
| 281 | ank | Ank repeat | 4.7e−19 | 76.7 |
| 282 | ank | Ank repeat | 4.7e−19 | 76.7 |
| 283 | SH3 | SH3 domain | 0.00011 | 26.4 |
| 284 | TPR | TPR Domain | 3.7e−11 | 50.5 |
| 285 | IRS | PTB domain (IRS-1 type) | 6.1e−19 | 76.4 |
| 286 | pkinase | Eukaryotic protein kinase domain | 1.6e−94 | 327.5 |
| 287 | efhand | EF hand | 2.9e−06 | 34.2 |
| 288 | RasGEF | RasGEF domain | 0.00021 | −30.8 |
| 289 | C2 | C2 domain | 0.002 | 23.4 |
| 290 | RasGEF | RasGEF domain | 6.2e−30 | 112.9 |
| 291 | TBC | TBC domain | 1.1e−42 | 155.2 |
| 292 | ras | Ras family | 1.2e−65 | 231.5 |
| 293 | pkinase | Eukaryotic protein kinase domain | 1.5e−71 | 251.1 |
| 294 | RhoGEF | RhoGEF domain | 6.5e−63 | 222.4 |
| 295 | PDZ | PDZ domain (Also known as DHR or GLGF). | 3.4e−50 | 180.2 |
| 296 | PDZ | PDZ domain (Also known as DHR or GLGF). | 0.034 | 15.5 |
| 297 | WD40 | WD domain, G-beta repeat | 7.8e−10 | 46.1 |
| 298 | WD40 | WD domain, G-beta repeat | 7.8e−10 | 46.1 |
| 299 | C2 | C2 domain | 1.2e−11 | 52.1 |
| 300 | DIX | DIX domain | 3.9e−22 | 87.0 |
| 301 | PH | PH domain | 0.025 | 13.4 |
| 302 | calponin | Calponin family | 7.2e−17 | 59.4 |
| 303 | TPR | TPR Domain | 1.7e−29 | 111.4 |
| 304 | zf-MYND | MYND finger | 8.3e−11 | 49.3 |
| 305 | EGF | EGF-like domain | 4.8e−35 | 129.8 |
| 306 | ank | Ank repeat | 0.00097 | 25.9 |
| 307 | PDZ | PDZ domain (Also known as DHR or GLGF). | 7.7e−10 | 46.1 |
| 308 | WD40 | WD domain, G-beta repeat | 5.9e−22 | 86.4 |
| 309 | CUB | CUB domain | 9.8e−186 | 630.4 |
| 310 | PH | PH domain | 6.8e−17 | 65.1 |
| 311 | pkinase | Eukaryotic protein kinase domain | 4.1e−61 | 216.5 |
| 312 | PAAD_DAPIN | | 8.5e−09 | 42.7 |
| 313 | cyclin | Cyclin | 9.9e−18 | 65.7 |
| 314 | pkinase | Eukaryotic protein kinase domain | 4.1e−09 | 36.8 |
| 315 | EGF | EGF-like domain | 9.1e−81 | 281.7 |
| 316 | ank | Ank repeat | 2.4e−42 | 154.1 |
| 317 | ank | Ank repeat | 3.6e−39 | 143.5 |
| 318 | HR1 | Hr1 repeat motif | 5.5e−17 | 69.9 |
| 319 | WD40 | WD domain, G-beta repeat | 1.7e−25 | 98.1 |
| 320 | TPR | TPR Domain | 0.011 | 22.4 |
| 321 | RA | Ras association (Ra1GDS/AF-6) domain | 2.7e−26 | 100.8 |
| 322 | PX | PX domain | 1.5e−19 | 78.4 |
| 323 | PH | PH domain | 1.9e−21 | 81.3 |
| 324 | IL1 | Interleukin 10 | 2.5e−22 | 83.4 |
| 325 | ank | Ank repeat | 2.6e−38 | 140.7 |
| 326 | pkinase | Eukaryotic protein kinase domain | 1.1e−53 | 191.7 |
| 327 | WD40 | WD domain, G-beta repeat | 4.7e−08 | 40.2 |
| 328 | PLDc | Phospholipase D. Active site motif | 1.3e−05 | 32.1 |
| 329 | C2 | C2 domain | 9e−21 | 82.4 |
| 330 | IQ | IQ calmodulin-binding motif | 1.1e−12 | 55.5 |
| 331 | S_100 | S-100/ICaBP type calcium binding domain | 5.6e−08 | 39.9 |
| 332 | pkinase | Eukaryotic protein kinase domain | 2.2e−48 | 174.2 |
| 333 | pkinase | Eukaryotic protein kinase domain | 6.9e−56 | 199.1 |
| 334 | pkinase | Eukaryotic protein kinase domain | 4.1e−79 | 276.3 |
| 335 | pkinase | Eukaryotic protein kinase domain | 6.8e−81 | 282.2 |
| 336 | ArfGap | Putative GTP-ase activating protein for Arf | 1.3e−30 | 115.2 |
| 337 | pkinase | Eukaryotic protein kinase domain | 2.4e−72 | 253.8 |
| 338 | GoLoco | LGN motif, putative GEF specific for G-alpha GTPase | 8.8e−45 | 162.2 |
| 339 | PH | PH domain | 2.3e−13 | 52.6 |
| 340 | RA | Ras association (Ra1GDS/AF-6) domain | 2.4e−09 | 44.5 |
| 342 | Band_41 | FERM domain (Band 4.1 family) | 0.0023 | 13.0 |
| 343 | PDZ | PDZ domain (Also known as DHR or GLGF). | 5.7e−65 | 229.3 |
| 344 | ank | Ank repeat | 4.9e−42 | 153.1 |
| 345 | ank | Ank repeat | 3.3e−68 | 240.0 |
| 346 | ank | Ank repeat | 2.3e−44 | 160.8 |
| 347 | laminin_EGF | Laminin EGF-like (Domains III and V) | 1.2e−215 | 729.8 |
| 348 | PH | PH domain | 2.2e−12 | 49.1 |
| 349 | pkinase | Eukaryotic protein kinase domain | 1.9e−80 | 280.7 |
| 350 | F-box | F-box domain. | 0.0022 | 24.7 |
| 351 | S_100 | S-100/ICaBP type calcium binding domain | 5.6e−08 | 39.9 |
| 352 | ank | Ank repeat | 3.2e−45 | 163.7 |
| 353 | WD40 | WD domain, G-beta repeat | 0.00031 | 27.5 |
| 354 | pkinase | Eukaryotic protein kinase domain | 8.8e−67 | 235.3 |
| 355 | transmembrane 4 | Transmembrane 4 family | 1.4e−28 | 94.4 |
| 356 | WD40 | WDdomain, G-beta repeat | 4.2e−15 | 63.6 |
| 357 | MyTH4 | Domain in Myosin and Kinesin Tails | 7.8e−15 | 62.7 |
| 358 | C2 | C2 domain | 5.4e−87 | 302.4 |
| 359 | pkinase | Eukaryotic protein kinase domain | 1.5e−73 | 257.8 |
| 360 | GAS2 | Growth-Arrest-Specific Protein 2 Domain | 6.4e−44 | 159.3 |
| 361 | pkinase | Eukaryotic protein kinase domain | 7.8e−81 | 282.0 |
| 362 | WD40 | WD domain, G-beta repeat | 3.9e−15 | 63.7 |
| 363 | Spin-Ssty | | 1.1e−163 | 557.2 |
| 364 | WD40 | WD domain, G-beta repeat | 7.2e−16 | 66.2 |
| 365 | EPH_1bd | Ephrin receptor ligand binding domain | 1.7e−119 | 410.4 |
| 366 | Collagen | Collagen triple helix repeat (20 copies) | 2.2e−62 | 220.7 |
| 367 | pkinase | Eukaryotic protein kinase domain | 4e−84 | 292.9 |
| 368 | Oxysterol_BP | Oxysterol-binding protein | 8.6e−77 | 268.5 |
| 369 | PDZ | PDZ domain (Also known as DHR or GLGF). | 4e−68 | 239.8 |
| 370 | ank | Ank repeat | 2.8e−52 | 187.1 |
| 371 | HD | HD domain | 0.00025 | 27.8 |
| 372 | ank | Ank repeat | 6.2e−36 | 132.8 |
| 373 | Oxysterol_BP | Oxysterol-binding protein | 1.6e−65 | 231.1 |
| 374 | WD40 | WD domain, G-beta repeat | 4.2e−32 | 120.1 |
| 375 | SH2 | Src homology domain 2 | 8.9e−27 | 80.8 |
| 376 | RhoGAP | RhoGAP domain | 0.0097 | −18.5 |
| 377 | complex1_49 Kd | Respiratory-chain NADH dehydrogenase, 49 Kd subunit | 3e−220 | 612.0 |
| 379 | fer4_NifH | 4Fe-4S iron sulfur cluster binding proteins, NifH/frxC | 0.0013 | 16.1 |
| | | family | | |
| 380 | Transthyretin | Transthyretin precursor (formerly prealbumin) | 6.4e−83 | 277.2 |
| 387 | Carboxyl_trans | Carboxyl transferase domain | 4e−209 | 708.1 |
| 390 | THF_DHG_CYH | Tetrahydrofolate dehydrogenase/cyclohydrolase | 6.4e−177 | 601.1 |
| 393 | CoA_trans | Coenzyme A transferase | 6.1e−192 | 651.0 |
| 395 | Agglutinin | Lectin (probable mannose binding) | 0.0015 | 11.4 |
| 397 | Xlink | Extracellular link domain | 7.1e−121 | 280.3 |
| 401 | OLF | Olfactomedin-like domain | 1.4e−120 | 414.0 |
| 402 | OLF | Olfactomedin-like domain | 1.4e−120 | 414.0 |
| 403 | ig | Immunoglobulin domain | 6e−13 | 46.8 |
| 404 | A2M_N | Alpha-2-macroglobulin family N-terminal region | 2.7e−42 | 145.3 |
| 406 | GTP_EFTU | Elongation factor Tu family | 2.1e−69 | 236.6 |
| 409 | p450 | Cytochrome P450 | 3.2e−141 | 482.6 |
| 410 | C1q | C1q domain | 3.1e−38 | 140.5 |
| 411 | Collagen | Collagen triple helix repeat (20 copies) | 3.9e−24 | 93.6 |
| 412 | C1q | C1q domain | 8.8e−42 | 152.2 |
| 413 | Collagen | Collagen triple helix repeat (20 copies) | 3.4e−23 | 90.5 |
| 414 | abhydrolase | alpha/beta hydrolase fold | 1.2e−12 | 55.5 |
| 415 | KRAB | KRAB box | 7.6e−14 | 59.4 |
| 416 | LRR | Leucine Rich Repeat | 1e−14 | 62.3 |
| 417 | cystatin | Cystatin domain | 2.1e−52 | 183.9 |
| 418 | cystatin | Cystatin domain | 4.2e−55 | 193.2 |
| 419 | cystatin | Cystatin domain | 1.5e−41 | 146.8 |
| 421 | abhydrolase | alpha/beta hydrolase fold | 0.0026 | 10.4 |
| 422 | fibrinogen_C | Fibrinogen beta and gamma chains, C-terminal globular | 5.4e−49 | 171.7 |
| | | domain | | |
| 423 | MHC_I | Class I Histocompatibility antigen, domains alpha 1 and 2 | 1.3e−57 | 204.8 |
| 424 | vwd | von Willebrand factor type D domain | 1.6e−37 | 134.9 |
| 425 | SRCR | Scavenger receptor cysteine-rich domain | 5.2e−69 | 242.7 |
| 427 | lipocalin | Lipocalin/cytosolic fatty-acid binding protein family | 2.6e−11 | 43.1 |
| 431 | CUB | CUB domain | 1.9e−32 | 121.2 |
| 432 | p450 | Cytochrome P450 | 8.3e−155 | 527.7 |
| 433 | asp | Eukaryotic aspartyl protease | 5.5e−183 | 621.3 |
| 434 | ig | Immunoglobulin domain | 6.4e−09 | 33.8 |
| 436 | ig | Immunoglobulin domain | 3.9e−07 | 28.0 |
| 440 | pyr_redox | Pyridine nucleotide-disulphide oxidoreductase | 0.00077 | 15.7 |
| 441 | Epimerase | NAD dependent epimerase/dehydratase family | 2.2e−43 | 157.6 |
| 443 | zf-C2H2 | Zinc finger, C2H2 type | 2.3e−47 | 170.8 |
| 450 | zf-C2H2 | Zinc finger, C2H2 type | 5.2e−113 | 388.8 |
| 455 | zf-C3HC4 | Zinc finger, C3HC4 type (RING finger) | 0.025 | 11.8 |
| 456 | zf-C2H2 | Zinc finger, C2H2 type | 9.6e−77 | 268.4 |
| 458 | tubulin | Tubulin/FtsZ family | 7.9e−40 | 145.7 |
| 461 | GNS1_SUR4 | GNS1/SUR4 family | 1.1e−08 | −37.4 |
| 462 | tubulin | Tubulin/FtsZ family | 7.2e−20 | 79.4 |
| 463 | zf-C2H2 | Zinc finger, C2H2 type | 1.4e−127 | 437.2 |
| 465 | Keratin_B2 | Keratin, high sulfur B2 protein | 1.2e−05 | 8.8 |
| 466 | zf-C2H2 | Zinc finger, C2H2 type | 1.1e−51 | 185.1 |
| 469 | P5CR | Delta 1-pyrroline-5-carboxylate reductase | 5.5e−05 | −62.2 |
| 470 | zf-C2H2 | Zinc finger, C2H2 type | 1.8e−100 | 347.2 |
| 471 | isodh | Isocitrate and isopropylmalate dehydrogenases | 1.6e−85 | 288.4 |
| 472 | zf-C2H2 | Zinc finger, C2H2 type | 6.5e−29 | 109.5 |
| 474 | zf-C2H2 | Zinc finger, C2H2 type | 5e−51 | 183.0 |
| 475 | zf-C2H2 | Zinc finger, C2H2 type | 1.4e−91 | 317.7 |
| 476 | Keratin_B2 | Keratin, high sulfur B2 protein | 6.3e−07 | 28.6 |
| 479 | zf-B_box | B-box zinc finger. | 6.7e−15 | 62.9 |
| 480 | zf-C2H2 | Zinc finger, C2H2 type | 2.3e−73 | 257.2 |
| 481 | zf-C2H2 | Zinc finger, C2H2 type | 2.5e−24 | 94.2 |
| 485 | arf | ADP-ribosylation factor family | 7.8e−09 | −4.2 |
| 486 | zf-C2H2 | Zinc finger, C2H2 type | 4.9e−11 | 50.1 |
| 488 | zf-C2H2 | Zinc finger, C2H2 type | 5.3e−56 | 199.5 |

[0473] TABLE 5

| SEQ ID | | | | | | | | SeqFold | | |
|---|---|---|---|---|---|---|---|---|---|---|
| NO: | PDB ID | Chain ID | Start AA | End AA | PSI BLAST | Verify score | PMF score | score | Compound | PDB Annotation |
| 246 | 1aui | B | 183 | 331 | 5.20E−16 | −0.06 | 0.25 | | “SERINE/THREONINE | “HYDROLASE CALCINEURIN; |
| | | | | | | | | | PHOSPHATASE 2B; CHAIN: | HYDROLASE, PHOSPHATASE, |
| | | | | | | | | | A, B;” | IMMUNOSUPPRESSION” |
| 246 | 1aui | B | 21 | 146 | 0.00039 | 0.27 | 0.46 | | “SERINE/THREONINE | “HYDROLASE CALCINEURIN; |
| | | | | | | | | | PHOSPHATASE 2B; CHAIN: | HYDROLASE, PHOSPHATASE, |
| | | | | | | | | | A, B;” | IMMUNOSUPPRESSION” |
| 246 | 1aui | B | 183 | 351 | 5.20E−16 | | | 60.79 | “SERINE/THREONINE | “HYDROLASE CALCINEURIN; |
| | | | | | | | | | PHOSPHATASE 2B; CHAIN: | HYDROLASE, PHOSPHATASE, |
| | | | | | | | | | A, B;” | IMMUNOSUPPRESSION” |
| 246 | 1bjf | A | 183 | 331 | 2.60E−16 | 0.14 | 0.87 | | “NEUROCALCIN DELTA; | “CALCIUM-BINDING CALCIUM-BINDING, |
| | | | | | | | | | CHAIN: A, B;” | MYRISTOYLATION, NEURONAL SPECIFIC |
| | | | | | | | | | | GUANYLATE 2 CYCLASE ACTIVATOR” |
| 246 | 1bjf | A | 21 | 146 | 6.50E−05 | 0.19 | 0.7 | | “NEUROCALCIN DELTA; | “CALCIUM-BINDING CALCIUM-BINDING, |
| | | | | | | | | | CHAIN: A, B;” | MYRISTOYLATION, NEURONAL SPECIFIC |
| | | | | | | | | | | GUANYLATE 2 CYCLASE ACTIVATOR” |
| 246 | 1bjf | A | 174 | 350 | 2.60E−16 | | | 73.38 | “NEUROCALCIN DELTA; | “CALCIUM-BINDING CALCIUM-BINDING, |
| | | | | | | | | | CHAIN: A, B;” | MYRISTOYLATION, NEURONAL SPECIFIC |
| | | | | | | | | | | GUANYLATE 2 CYCLASE ACTIVATOR” |
| 246 | 1cll | | 21 | 146 | 0.0039 | −0.11 | 0.49 | | | CALCIUM-BINDING PROTEIN |
| | | | | | | | | | | CALMODULIN (VERTEBRATE) 1CLL 3 |
| 246 | 1cmf | | 93 | 146 | 0.0078 | 0.55 | 1 | | CALMODULIN | CALCIUM-BINDING PROTEIN |
| | | | | | | | | | (VERTEBRATE); 1CMF 6 | CALMODULIN APO TR2C-DOMAIN; 1CMF 9 |
| | | | | | | | | | CHAIN: NULL; 1CMF 7 | |
| 246 | 1dgv | A | 11 | 129 | 0.0039 | −0.28 | 0.16 | | APO CIB; CHAIN: A | “BLOOD CLOTTING HELICAL, EF-HAND, |
| | | | | | | | | | | BLOOD CLOTTING” |
| 246 | 1eg3 | A | 80 | 150 | 0.00078 | 0.64 | 0.9 | | DYSTROPHIN; CHAIN: A; | “STRUCTURAL PROTEIN EF-HAND LIKE |
| | | | | | | | | | | DOMAIN, WW DOMAIN” |
| 246 | 1exr | A | 21 | 148 | 0.0013 | 0.21 | 0.58 | | CALMODULIN; CHAIN: A; | “METAL TRANSPORT CALMODULIN, |
| | | | | | | | | | | HIGH RESOLUTION, DISORDER” |
| 246 | 1fpw | A | 174 | 331 | 2.60E−21 | −0.03 | 0.89 | | CALCIUM-BINDING | “METAL BINDING PROTEIN YEAST |
| | | | | | | | | | PROTEIN NCS-1; CHAIN: A; | FREQUENIN EF-HAND, CALCIUM” |
| 246 | 1fpw | A | 1 | 120 | 1.30E−06 | 0.07 | 0.09 | | CALCIUM-BINDING | “METAL BINDING PROTEIN YEAST |
| | | | | | | | | | PROTEIN NCS-1; CHAIN: A; | FREQUENIN EF-HAND, CALCIUM” |
| 246 | 1iku | | 178 | 331 | 1.00E−21 | 0.15 | 0.84 | | RECOVERIN; CHAIN: NULL; | “CALCIUM-BINDING PROTEIN CALCIUM- |
| | | | | | | | | | | MYRISTOYL SWITCH, CALCUIM- |
| | | | | | | | | | | BINDING PROTEIN” |
| 246 | 1iku | | 4 | 129 | 9.10E−06 | 0.08 | 0.93 | | RECOVERIN; CHAIN: NULL; | “CALCIUM-BINDING PROTEIN CALCIUM- |
| | | | | | | | | | | MYRISTOYL SWITCH, CALCUIM- |
| | | | | | | | | | | BINDING PROTEIN” |
| 246 | 1iku | | 174 | 351 | 1.00E−21 | | | 72.88 | RECOVERIN; CHAIN: NULL; | “CALCIUM-BINDING PROTEIN CALCIUM- |
| | | | | | | | | | | MYRISTOYL SWITCH, CALCUIM- |
| | | | | | | | | | | BINDING PROTEIN” |
| 246 | 1jba | A | 211 | 331 | 2.60E−17 | −0.15 | 0.25 | | GUANYLATE CYCLASE | “LYASE GCAP-2; EF-HAND, CALCIUM- |
| | | | | | | | | | ACTIVATING PROTEIN 2; | BINDING PROTEIN, GUANYLYL CYCLASE |
| | | | | | | | | | CHAIN: A; | 2 REGULATION” |
| 246 | 1rec | | 178 | 331 | 5.20E−19 | 0.03 | 0.42 | | | CALCIUM-BINDING PROTEIN |
| | | | | | | | | | | RECOVERIN (CALCIUM SENSOR IN |
| | | | | | | | | | | VISION) 1REC 3 |
| 246 | 1rec | | 10 | 139 | 0.0001 | −0.26 | 0.12 | | | CALCIUM-BINDING PROTEIN |
| | | | | | | | | | | RECOVERIN (CALCIUM SENSOR IN |
| | | | | | | | | | | VISION) 1REC 3 |
| 246 | 1rec | | 178 | 351 | 5.20E−19 | | | 50.07 | | CALCIUM-BINDING PROTEIN |
| | | | | | | | | | | RECOVERIN (CALCIUM SENSOR IN |
| | | | | | | | | | | VISION) 1REC 3 |
| 246 | 1top | | 90 | 148 | 0.0078 | 0.59 | 0.29 | | | CONTRACTILE SYSTEM PROTEIN |
| | | | | | | | | | | TROPONIN C 1TOP 3 |
| 246 | 1trc | A | 93 | 146 | 0.0052 | −0.01 | 0.76 | | | CALCIUM BINDING PROTEIN |
| | | | | | | | | | | CALMODULIN (/TR = 2 = C$ FRAGMENT |
| | | | | | | | | | | COMPRISING RESIDUES 78-148 1TRC 3 |
| | | | | | | | | | | OF THE INTACT MOLECULE) 1TRC 4 |
| 246 | 1vrk | A | 190 | 331 | 1.00E−10 | −0.33 | 0.19 | | CALMODULIN; CHAIN: A; | “CALMODULIN, CALCIUM BINDING, |
| | | | | | | | | | RS20; CHAIN: B; | HELIX-LOOP-HELIX, SIGNALLING, 2 |
| | | | | | | | | | | COMPLEX(CALCIUM-BINDING |
| | | | | | | | | | | PROTEIN/PEPTIDE)” |
| 246 | 1vrk | A | 72 | 148 | 0.0026 | −0.07 | 0.4 | | CALMODULIN; CHAIN: A; | “CALMODULIN, CALCIUM BINDING, |
| | | | | | | | | | RS20; CHAIN: B; | HELIX-LOOP-HELIX, SIGNALLING, 2 |
| | | | | | | | | | | COMPLEX(CALCIUM-BINDING |
| | | | | | | | | | | PROTEIN/PEPTIDE)” |
| 246 | 1wdc | B | 191 | 324 | 1.00E−10 | −0.4 | 0.22 | | “SCALLOP MYOSIN; CHAIN: | “MUSCLE PROTEIN MYOSIN, CALCIUM |
| | | | | | | | | | A, B, C;” | BINDING PROTEIN, MUSCLE PROTEIN” |
| 246 | 1wdc | B | 72 | 146 | 0.0039 | −0.23 | 0.04 | | “SCALLOP MYOSIN; CHAIN: | “MUSCLE PROTEIN MYOSIN, CALCIUM |
| | | | | | | | | | A, B, C;” | BINDING PROTEIN, MUSCLE PROTEIN” |
| 246 | 5pal | | 55 | 146 | 0.0065 | 0.05 | 0.59 | | | CALCIUM-BINDING PROTEIN |
| | | | | | | | | | | PARVALBUMIN (ALPHA LINEAGE) 5PAL 3 |
| 251 | 1aip | A | 92 | 442 | 0 | | | 85.64 | “ELONGATION FACTOR TU; | “COMPLEX OF TWO ELONGATION |
| | | | | | | | | | CHAIN: A, B, E, F; | FACTORS EF-TU; EF-TS; ELONGATION |
| | | | | | | | | | ELONGATION FACTOR TS; | FACTOR, NUCLEOTIDE EXCHANGE, GTP- |
| | | | | | | | | | CHAIN: C, D, G, H;” | BINDING, 2 COMPLEX OF TWO |
| | | | | | | | | | | ELONGATION FACTORS” |
| 251 | 1d2e | A | 69 | 451 | 0 | | | 117.42 | “ELONGATION FACTOR TU | “RNA BINDING PROTEIN G-PROTEIN, |
| | | | | | | | | | (EF-TU); CHAIN: A, B, C, D” | BETA-BARREL” |
| 251 | 1dar | | 4 | 553 | 2.60E−87 | | | 114.99 | ELONGATION FACTOR G; | “TRANSLATIONAL GTPASE EF-G |
| | | | | | | | | | CHAIN: NULL; | RIBOSOMAL TRANSLOCASE, |
| | | | | | | | | | | TRANSLATIONAL GTPASE” |
| 251 | 1efc | A | 65 | 442 | 0 | | | 108.03 | “ELONGATION FACTOR; | “RNA BINDING PROTEIN EFTU; |
| | | | | | | | | | CHAIN: A, B;” | TRANSPORT AND PROTECTION PROTEIN, |
| | | | | | | | | | | RNA BINDING PROTEIN” |
| 251 | 1efu | A | 69 | 437 | 0 | | | 83.78 | “ELONGATION FACTOR TU; | “COMPLEX (TWO ELONGATION |
| | | | | | | | | | CHAIN: A, C; ELONGATION | FACTORS) ELONGATION FACTOR FOR |
| | | | | | | | | | FACTOR TS; CHAIN: B, D;” | TRANSFER, HEAT UNSTABLE, |
| | | | | | | | | | | ELONGATION FACTOR FOR TRANSFER, |
| | | | | | | | | | | HEAT STABLE, ELONGATION FACTOR, |
| | | | | | | | | | | COMPLEX (TWO ELONGATION |
| | | | | | | | | | | FACTORS)” |
| 251 | 2efg | A | 2 | 552 | 1.30E−84 | | | 116.45 | ELONGATION FACTOR G; | “PROTEIN BINDING EF-G; EF-G |
| | | | | | | | | | CHAIN: A; ELONGATION | ELONGATION FACTOR, TRANSLOCASE, |
| | | | | | | | | | FACTOR G DOMAIN 3; | RIBOSOME, ELONGATION, 2 |
| | | | | | | | | | CHAIN: B; | TRANSLATION, PROTEIN SYNT FACTOR, |
| | | | | | | | | | | GTPASE, GTP BINDING, 3 GUANOSINE |
| | | | | | | | | | | NUCLEOTIDE BINDING,, PROTEIN |
| | | | | | | | | | | BINDING” |
| 253 | 1byr | A | 111 | 257 | 1.20E−28 | | | 82.42 | ENDONUCLEASE; CHAIN: | “ENDONUCLEASE ENDONUCLEASE, |
| | | | | | | | | | A; | PHOSPHODIESTERASE,” |
| 254 | 1avl | A | 113 | 313 | 0.0017 | | | 58.59 | “APOLIPOPROTEIN A-I; | “LIPID TRANSPORT APO A-I; |
| | | | | | | | | | CHAIN: A, B, C, D;” | LIPOPROTEIN, LIPID TRANSPORT, |
| | | | | | | | | | | CHOLESTEROL METABOLISM, 2 |
| | | | | | | | | | | ATHEROSCLEROSIS, HDL, LCAT- |
| | | | | | | | | | | ACTIVATION” |
| 256 | 1rgp | | 289 | 484 | 3.90E−44 | | | 74.05 | RHOGAP; CHAIN: NULL; | “G-PROTEIN CDC42 GTPASE-ACTIVATING |
| | | | | | | | | | | PROTEIN; G-PROTEIN, GAP, SIGNAL- |
| | | | | | | | | | | TRANSDUCTION” |
| 256 | 1tx4 | A | 292 | 495 | 2.60E−46 | | | 78.72 | P50-RHOGAP; CHAIN: A; | “COMPLEX (GTPASE ACTIVATN/PROTO- |
| | | | | | | | | | TRANSFORMING PROTEIN | ONCOGENE) GTPASE-ACTIVATING |
| | | | | | | | | | RHOA; CHAIN: B; | PROTEIN RHOGAP; COMPLEX (GTPASE |
| | | | | | | | | | | ACTIVATION/PROTO-ONCOGENE), |
| | | | | | | | | | | GTPASE, 2 TRANSITION STATE, GAP” |
| 258 | 1pbw | A | 21 | 210 | 3.90E−45 | 0.26 | 0.99 | | “PHOSPHATIDYLINOSITOL | “PHOSPHOTRANSFERASE RHOGAP |
| | | | | | | | | | 3-KINASE; CHAIN: A, B;” | DOMAIN; PHOSPHOTRANSFERASE, |
| | | | | | | | | | | TPASE ACTIVATING PROTEIN, GAP, |
| | | | | | | | | | | CDC42, 2 PHOSPHOINOSITIDE 3-KINASE, |
| | | | | | | | | | | SH3 DOMAIN, SH2 DOMAIN, 3 SIGNAL |
| | | | | | | | | | | TRANSDUCTION” |
| 258 | 1pbw | B | 21 | 215 | 6.50E−45 | 0.44 | 0.99 | | “PHOSPHATIDYLINOSITOL | “PHOSPHOTRANSFERASE RHOGAP |
| | | | | | | | | | 3-KINASE; CHAIN: A, B;” | DOMAIN; PHOSPHOTRANSFERASE, |
| | | | | | | | | | | TPASE ACTIVATING PROTEIN, GAP, |
| | | | | | | | | | | CDC42, 2 PHOSPHOINOSITIDE 3-KINASE, |
| | | | | | | | | | | SH3 DOMAIN, SH2 DOMAIN, 3-SIGNAL |
| | | | | | | | | | | TRANSDUCTION” |
| 258 | 1pbw | B | 34 | 214 | 5.10E−22 | 0.37 | 0.99 | | “PHOSPHATIDYLINOSITOL | “PHOSPHOTRANSFERASE RHOGAP |
| | | | | | | | | | 3-KINASE; CHAIN: A, B;” | DOMAIN; PHOSPHOTRANSFERASE, |
| | | | | | | | | | | TPASE ACTIVATING PROTEIN, GAP, |
| | | | | | | | | | | CDC42, 2 PHOSPHOINOSITIDE 3-KINASE, |
| | | | | | | | | | | SH3 DOMAIN, SH2 DOMAIN, 3 SIGNAL |
| | | | | | | | | | | TRANSDUCTION” |
| 258 | 1pbw | A | 34 | 190 | 3.40E−21 | 0.4 | 0.8 | | “PHOSPHATIDYLINOSITOL | “PHOSPHOTRANSFERASE RHOGAP |
| | | | | | | | | | 3-KINASE; CHAIN: A, B;” | DOMAIN; PHOSPHOTRANSFERASE, |
| | | | | | | | | | | TPASE ACTIVATING PROTEIN, GAP, |
| | | | | | | | | | | CDC42, 2 PHOSPHOINOSITIDE 3-KINASE, |
| | | | | | | | | | | SH3 DOMAIN, SH2 DOMAIN, 3 SIGNAL |
| | | | | | | | | | | TRANSDUCTION” |
| 258 | 1pbw | A | 20 | 201 | 3.90E−45 | | | 81.22 | “PHOSPHATIDYLINOSITOL | “PHOSPHOTRANSFERASE RHOGAP |
| | | | | | | | | | 3-KINASE; CHAIN: A, B;” | DOMAIN; PHOSPHOTRANSFERASE, |
| | | | | | | | | | | TPASE ACTIVATING PROTEIN, GAP, |
| | | | | | | | | | | CDC42, 2 PHOSPHOINOSITIDE 3-KINASE, |
| | | | | | | | | | | SH3 DOMAIN, SH2 DOMAIN, 3 SIGNAL |
| | | | | | | | | | | TRANSDUCTION” |
| 258 | 1pbw | B | 20 | 217 | 6.50E−45 | | | 79.67 | “PHOSPHATIDYLINOSITOL | “PHOSPHOTRANSFERASE RHOGAP |
| | | | | | | | | | 3-KINASE; CHAIN: A, B;” | DOMAIN; PHOSPHOTRANSFERASE, |
| | | | | | | | | | | TPASE ACTIVATING PROTEIN, GAP, |
| | | | | | | | | | | CDC42, 2 PHOSPHOINOSITIDE 3-KINASE, |
| | | | | | | | | | | SH3 DOMAIN, SH2 DOMAIN, 3 SIGNAL |
| | | | | | | | | | | TRANSDUCTION” |
| 258 | 1rgp | | 12 | 215 | 2.60E−51 | 0.42 | 1 | | RHOGAP; CHAIN: NULL; | “G-PROTEIN CDC42 GTPASE-ACTIVATING |
| | | | | | | | | | | PROTEIN; G-PROTEIN, GAP, SIGNAL- |
| | | | | | | | | | | TRANSDUCTION” |
| 258 | 1rgp | | 9 | 182 | 6.80E−35 | 0.39 | 1 | | RHOGAP; CHAIN: NULL; | “G-PROTEIN CDC42 GTPASE-ACTIVATING |
| | | | | | | | | | | PROTEIN; G-PROTEIN, GAP, SIGNAL- |
| | | | | | | | | | | TRANSDUCTION” |
| 258 | 1rgp | | 9 | 195 | 2.60E−51 | | | 102.59 | RHOGAP; CHAIN: NULL; | “G-PROTEIN CDC42 GTPASE-ACTIVATING |
| | | | | | | | | | | PROTEIN; G-PROTEIN, GAP, SIGNAL- |
| | | | | | | | | | | TRANSDUCTION” |
| 258 | 1tx4 | A | 14 | 215 | 9.10E−55 | 0.67 | 1 | 40 | P50-RHOGAP; CHAIN: A; | “COMPLEX(GTPASE ACTIVATN/PROTO- |
| | | | | | | | | | TRANSFORMING PROTEIN | ONCOGENE) GTPASE-ACTIVATING |
| | | | | | | | | | RHOA; CHAIN: B; | PROTEIN RHOGAP; COMPLEX (GTPASE |
| | | | | | | | | | | ACTIVATION/PROTO-ONCOGENE), |
| | | | | | | | | | | GTPASE, 2 TRANSITION STATE, GAP” |
| 258 | 1tx4 | A | 12 | 182 | 1.70E−33 | 0.46 | 1 | | P50-RHOGAP; CHAIN: A; | “COMPLEX(GTPASE ACTIVATN/PROTO- |
| | | | | | | | | | TRANSFORMING PROTEIN | ONCOGENE) GTPASE-ACTIVATING |
| | | | | | | | | | RHOA; CHAIN: B; | PROTEIN RHOGAP; COMPLEX(GTPASE |
| | | | | | | | | | | ACTIVATION/PROTO-ONCOGENE), |
| | | | | | | | | | | GTPASE, 2 TRANSITION STATE, GAP” |
| 258 | 1tx4 | A | 12 | 215 | 9.10E−55 | | | 107.19 | P50-RHOGAP; CHAIN: A; | “COMPLEX(GTPASE ACTIVATN/PROTO- |
| | | | | | | | | | TRANSFORMING PROTEIN | ONCOGENE) GTPASE-ACTIVATING |
| | | | | | | | | | RHOA; CHAIN: B; | PROTEIN RHOGAP; COMPLEX (GTPASE |
| | | | | | | | | | | ACTIVATION/PROTO-ONCOGENE), |
| | | | | | | | | | | GTPASE, 2 TRANSITION STATE, GAP” |
| 259 | 1apm | E | 109 | 466 | 6.50E−42 | | | 103.32 | | “TRANSFERASE(PHOSPHOTRANSFERASE |
| | | | | | | | | | | ) $C-/AMP$-DEPENDENT PROTEIN |
| | | | | | | | | | | KINASE (E.C.2.7.1.37) ($C/APK$) 1APM 3 |
| | | | | | | | | | | (CATALYTIC SUBUNIT) ““ALPHA”” |
| | | | | | | | | | | ISOENZYME MUTANT WITH SER 139 |
| | | | | | | | | | | 1APM 4 REPLACED BY ALA (/S139A$) |
| | | | | | | | | | | COMPLEX WITH THE PEPTIDE 1APM 5 |
| | | | | | | | | | | INHIBITOR PKI(5-24) AND THE |
| | | | | | | | | | | DETERGENT MEGA-8 1APM 6” |
| 259 | 1aze | A | 59 | 111 | 1.30E−15 | 0.14 | 0.76 | | GRB2; CHAIN: A; SOS; | “COMPLEX (ADAPTOR PROTEIN/PEPTIDE) |
| | | | | | | | | | CHAIN: B; | ASH, GROWTH FACTOR RECEPTOR- |
| | | | | | | | | | | BOUND PROTEIN 2; COMPLEX (ADAPTOR |
| | | | | | | | | | | PROTEIN/PEPTIDE), SH3 DOMAIN, 2 |
| | | | | | | | | | | GUANINE-NUCLEOTIDE RELEASING |
| | | | | | | | | | | FACTOR” |
| 259 | 1b6c | B | 137 | 409 | 3.90E−67 | 0.4 | 0.89 | | “FK506-BINDING PROTEIN; | “COMPLEX (ISOMERASE/PROTEIN |
| | | | | | | | | | CHAIN: A, C, E, G; TGF-B | KINASE) FKBP12; SERINE/THREONINE- |
| | | | | | | | | | SUPERFAMILY RECEPTOR | PROTEIN KINASE RECEPTOR R4; |
| | | | | | | | | | TYPE I; CHAIN: B, D, F, H;” | COMPLEX (ISOMERASE/PROTEIN |
| | | | | | | | | | | KINASE), RECEPTOR 2 |
| | | | | | | | | | | SERINE/THREONINE KINASE” |
| 259 | 1bb9 | | 58 | 113 | 9.10E−18 | −0.17 | 0.89 | | AMPHIPHYSIN 2; CHAIN: | “TRANSFERASE TRANSFERASE, SH3 |
| | | | | | | | | | NULL; | DOMAIN” |
| 259 | 1bbz | A | 59 | 113 | 1.30E−15 | 0.34 | 0.8 | | “ABL TYROSINE KINASE; | “COMPLEX (TRANSFERASE/PEPTIDE) |
| | | | | | | | | | CHAIN: A, C, E, G; PEPTIDE | COMPLEX (TRANSFERASE/PEPTIDE), |
| | | | | | | | | | P41; CHAIN: B, D, F, H;” | SIGNAL TRANSDUCTION, 2 SH3 DOMAIN” |
| 259 | 1blx | A | 138 | 436 | 1.30E−36 | | | 105.3 | CYCLIN-DEPENDENT | “COMPLEX (INHIBITOR |
| | | | | | | | | | KINASE 6; CHAIN: A; | PROTEIN/KINASE) INHIBITOR PROTEIN, |
| | | | | | | | | | P19INK4D; CHAIN: B; | CYCLIN-DEPENDENT KINASE, CELL |
| | | | | | | | | | | CYCLE 2 CONTROL, ALPHA/BETA, |
| | | | | | | | | | | COMPLEX (INHIBITOR |
| | | | | | | | | | | PROTEIN/KINASE)” |
| 259 | 1byg | A | 138 | 409 | 6.50E−77 | 0.6 | 1 | | C-TERMINAL SRC KINASE; | “TRANSFERASE CSK; PROTEIN KINASE, |
| | | | | | | | | | CHAIN: A; | C-TERMINAL SRC KINASE, |
| | | | | | | | | | | PHOSPHORYLATION, 2 STAUROSPORINE, |
| | | | | | | | | | | TRANSFERASE” |
| 259 | 1byg | A | 150 | 406 | 6.80E−49 | 0.27 | 1 | | C-TERMINAL SRC KINASE; | “TRANSFERASE CSK; PROTEIN KINASE, |
| | | | | | | | | | CHAIN: A; | C-TERMINAL SRC KINASE, |
| | | | | | | | | | | PHOSPHORYLATION, 2 STAUROSPORINE, |
| | | | | | | | | | | TRANSFERASE” |
| 259 | 1byg | A | 137 | 411 | 6.50E−77 | | | 126.82 | C-TERMINAL SRC KINASE; | “TRANSFERASE CSK; PROTEIN KINASE, |
| | | | | | | | | | CHAIN: A; | C-TERMINAL SRC KINASE, |
| | | | | | | | | | | PHOSPHORYLATION, 2 STAUROSPORINE, |
| | | | | | | | | | | TRANSFERASE” |
| 259 | 1cki | A | 146 | 403 | 5.20E−48 | 0.22 | 0.78 | | “CASEIN KINASE I DELTA; | PHOSPHOTRANSFERASE PROTEIN |
| | | | | | | | | | 1CKI 6 CHAIN: A, B; 1CKI 7” | KINASE 1CKI 18 |
| 259 | 1cmk | E | 90 | 466 | 1.20E−41 | | | 107.48 | | PHOSPHOTRANSFERASE CAMP- |
| | | | | | | | | | | DEPENDENT PROTEIN KINASE |
| | | | | | | | | | | CATALYTIC SUBUNIT 1CMK 3 |
| | | | | | | | | | | (E.C.2.7.1.37) 1CMK 4 |
| 259 | 1f3m | C | 145 | 400 | 3.90E−52 | 0.28 | 1 | | “SERINE/THREONINE- | “TRANSFERASE KINASE DOMAIN, |
| | | | | | | | | | PROTEIN KINASE PAK- | AUTOINHIBITORY FRAGMENT, |
| | | | | | | | | | ALPHA; CHAIN: A, B; | HOMODIMER” |
| | | | | | | | | | SERINE/THREONINE- | |
| | | | | | | | | | PROTEIN KINASE PAK- | |
| | | | | | | | | | ALPHA; CHAIN: C, D;” | |
| 259 | 1fgk | B | 138 | 406 | 3.90E−77 | 0.56 | 1 | | “FGF RECEPTOR 1; CHAIN: | “PHOSPHOTRANSFERASE FGFR1K, |
| | | | | | | | | | A, B;” | FIBROBLAST GROWTH FACTOR |
| | | | | | | | | | | RECEPTOR 1; TRANSFERASE, TYROSINE- |
| | | | | | | | | | | PROTEIN KINASE, ATP-BINDING, 2 |
| | | | | | | | | | | PHOSPHORYLATION, RECEPTOR, |
| | | | | | | | | | | PHOSPHOTRANSFERASE” |
| 259 | 1fgk | A | 138 | 406 | 1.00E−76 | 0.68 | 1 | | “FGF RECEPTOR 1; CHAIN: | “PHOSPHOTRANSFERASE FGFR1K, |
| | | | | | | | | | A, B;” | FIBROBLAST GROWTH FACTOR |
| | | | | | | | | | | RECEPTOR 1; TRANSFERASE, TYROSINE- |
| | | | | | | | | | | PROTEIN KINASE, ATP-BINDING, 2 |
| | | | | | | | | | | PHOSPHORYLATION, RECEPTOR, |
| | | | | | | | | | | PHOSPHOTRANSFERASE” |
| 259 | 1fgk | B | 137 | 410 | 1.20E−45 | 0.71 | 1 | | “FGF RECEPTOR 1; CHAIN: | “PHOSPHOTRANSFERASE FGFR1K, |
| | | | | | | | | | A, B;” | FIBROBLAST GROWTH FACTOR |
| | | | | | | | | | | RECEPTOR 1; TRANSFERASE, TYROSINE- |
| | | | | | | | | | | PROTEIN KINASE, ATP-BINDING, 2 |
| | | | | | | | | | | PHOSPHORYLATION, RECEPTOR, |
| | | | | | | | | | | PHOSPHOTRANSFERASE” |
| 259 | 1fgk | A | 166 | 410 | 1.70E−44 | 0.42 | 1 | | “FGF RECEPTOR 1; CHAIN: | “PHOSPHOTRANSFERASE FGFR1K, |
| | | | | | | | | | A, B;” | FIBROBLAST GROWTH FACTOR |
| | | | | | | | | | | RECEPTOR 1; TRANSFERASE, TYROSINE- |
| | | | | | | | | | | PROTEIN KINASE, ATP-BINDING, 2 |
| | | | | | | | | | | PHOSPHORYLATION, RECEPTOR, |
| | | | | | | | | | | PHOSPHOTRANSFERASE” |
| 259 | 1fgk | B | 127 | 410 | 3.90E−77 | | | 154.88 | “FGF RECEPTOR 1; CHAIN: | “PHOSPHOTRANSFERASE FGFR1K, |
| | | | | | | | | | A, B;” | FIBROBLAST GROWTH FACTOR |
| | | | | | | | | | | RECEPTOR 1; TRANSFERASE, TYROSINE- |
| | | | | | | | | | | PROTEIN KINASE, ATP-BINDING, 2 |
| | | | | | | | | | | PHOSPHORYLATION, RECEPTOR, |
| | | | | | | | | | | PHOSPHOTRANSFERASE” |
| 259 | 1fgk | A | 135 | 410 | 1.00E−76 | | | 149.68 | “FGF RECEPTOR 1; CHAIN: | “PHOSPHOTRANSFERASE FGFR1K, |
| | | | | | | | | | A, B;” | FIBROBLAST GROWTH FACTOR |
| | | | | | | | | | | RECEPTOR 1; TRANSFERASE, TYROSINE- |
| | | | | | | | | | | PROTEIN KINASE, ATP-BINTDING, 2 |
| | | | | | | | | | | PHOSPHORYLATION, RECEPTOR, |
| | | | | | | | | | | PHOSPHOTRANSFERASE” |
| 259 | 1fmk | | 51 | 417 | 6.80E−81 | 0.53 | 1 | | TYROSINE-PROTEIN | “PHOSPHOTRANSFERASE C-SRC, P60- |
| | | | | | | | | | KINASE SRC; CHAIN: NULL; | SRC; SRC, TYROSINE KINASE, |
| | | | | | | | | | | PHOSPHORYLATION, SH2, SH3, 2 |
| | | | | | | | | | | PHOSPHOTYROSINE, PROTO-ONCOGENE, |
| | | | | | | | | | | PHOSPHOTRANSFERASE” |
| 259 | 1fmk | | 1 | 419 | 6.80E−81 | | | 125.36 | TYROSINE-PROTEIN | “PHOSPHOTRANSFERASE C-SRC, P60- |
| | | | | | | | | | KINASE SRC; CHAIN: NULL; | SRC; SRC, TYROSINE KINASE, |
| | | | | | | | | | | PHOSPHORYLATION, SH2, SH3, 2 |
| | | | | | | | | | | PHOSPHOTYROSINE, PROTO-ONCOGENE, |
| | | | | | | | | | | PHOSPHOTRANSFERASE” |
| 259 | 1fpu | A | 127 | 406 | 1.20E−73 | 0.75 | 1 | | “PROTO-ONCOGENE | “TRANSFERASE P150, C-ABL; KINASE, |
| | | | | | | | | | TYROSINE-PROTEIN | KINASE INHIBITOR, STI-571, ACTIVATION |
| | | | | | | | | | KINASE ABL; CHAIN: A, B;” | LOOP” |
| 259 | 1fpu | A | 134 | 408 | 140E−65 | 0.69 | 1 | | “PROTO-ONCOGENE | “TRANSFERASE P150, C-ABL; KINASE, |
| | | | | | | | | | TYROSINE-PROTEIN | KINASE INHIBITOR, STI-571, ACTIVATION |
| | | | | | | | | | KINASE ABL; CHAIN: A, B;” | LOOP” |
| 259 | 1fyn | A | 55 | 113 | 9.10E−15 | 0.38 | 0.9 | | PHOSPHOTRANSFERASE | “TRANSFERASE PROTO-ONCOGENE |
| | | | | | | | | | FYN; CHAIN: A; 3BP-2; | TYROSINE KINASE; PROTO-ONCOGENE, |
| | | | | | | | | | CHAIN: B; | TRANSFERASE, TYROSINE-PROTEIN |
| | | | | | | | | | | KINASE, 2 PHOSPHORYLATION, ATP- |
| | | | | | | | | | | BINDING, MYRISTYLATION, SH3 |
| | | | | | | | | | | DOMAIN, 3 COMPLEX |
| | | | | | | | | | | (PHOSPHOTRANSFERASE/PEPTIDE)” |
| 259 | 1gbq | A | 59 | 113 | 9.10E−16 | 0.21 | 0.96 | | GRB2; CHAIN: A; SOS-1; | “COMPLEX (SIGNAL |
| | | | | | | | | | CHAIN: B; | TRANSDUCTION/PEPTIDE) COMPLEX |
| | | | | | | | | | | (SIGNAL TRANSDUCTION/PEPTIDE), SH3 |
| | | | | | | | | | | DOMAIN” |
| 259 | 1gfc | | 55 | 113 | 7.80E−17 | 0.31 | 0.99 | | | “ADAPTOR PROTEIN CONTAINING SH2 |
| | | | | | | | | | | AND SH3 GROWTH FACTOR RECEPTOR- |
| | | | | | | | | | | BOUND PROTEIN 2 (GRB2) 1GFC3 (C- |
| | | | | | | | | | | TERMINAL SH3 DOMAIN) (NMR, |
| | | | | | | | | | | MINIMIZED MEAN STRUCTURE) 1GFC 4” |
| 259 | 1gri | A | 56 | 113 | 1.00E−14 | 0.45 | 0.99 | | “GROWTH FACTOR BOUND | “SIGNAL TRANSDUCTION ADAPTOR SH2, |
| | | | | | | | | | PROTEIN 2; 1GRI 5 CHAIN: | SH3 1GRI 14” |
| | | | | | | | | | A, B; 1GRI6” | |
| 259 | 1hsq | | 49 | 113 | 2.60E−16 | 0.32 | 0.77 | | | “PHOSPHORIC DIESTER HYDROLASE |
| | | | | | | | | | | PHOSPHOLIPASE C-GAMMA (SH3 |
| | | | | | | | | | | DOMAIN) (E.C.3.1.4.11) 1HSQ 3 (NMR, |
| | | | | | | | | | | MINIMIZED MEAN STRUCTURE) 1HSQ 4” |
| 259 | 1ir3 | A | 138 | 425 | 3.90E−79 | 0.48 | 1 | | INSULIN RECEPTOR; | “COMPLEX (TRANSFERASE/SUBSTRATE) |
| | | | | | | | | | CHAIN: A; PEPTIDE | TYROSINE KINASE, SIGNAL |
| | | | | | | | | | SUBSTRATE; CHAIN: B; | TRANSDUCTION, |
| | | | | | | | | | | PHOSPHOTRANSFERASE, 2 COMPLEX |
| | | | | | | | | | | (KINASE/PEPTIDE SUBSTRATE/ATP |
| | | | | | | | | | | ANALOG), ENZYME, 3 COMPLEX |
| | | | | | | | | | | (TRANSFERASE/SUBSTRATE)” |
| 259 | 1ir3 | A | 131 | 425 | 3.40E−50 | 0.51 | 1 | | INSULIN RECEPTOR; | “COMPLEX (TRANSFERASE/SUBSTRATE) |
| | | | | | | | | | CHAIN: A; PEPTIDE | TYROSINE KINASE, SIGNAL |
| | | | | | | | | | SUBSTRATE; CHAIN: B; | TRANSDUCTION, |
| | | | | | | | | | | PHOSPHOTRANSFERASE, 2 COMPLEX |
| | | | | | | | | | | (KINASE/PEPTIDE SUBSTRATE/ATP |
| | | | | | | | | | | ANALOG), ENZYME, 3 COMPLEX |
| | | | | | | | | | | (TRANSFERASE/SUBSTRATE)” |
| 259 | 1ir3 | A | 128 | 425 | 3.90E−79 | | | 134.78 | INSULIN RECEPTOR; | “COMPLEX (TRANSFERASE/SUBSTRATE) |
| | | | | | | | | | CHAIN: A; PEPTIDE | TYROSINE KINASE, SIGNAL |
| | | | | | | | | | SUBSTRATE; CHAIN: B; | TRANSDUCTION, |
| | | | | | | | | | | PHOSPHOTRANSFERASE, 2 COMPLEX |
| | | | | | | | | | | (KINASE/PEPTIDE SUBSTRATE/ATP |
| | | | | | | | | | | ANALOG), ENZYME, 3 COMPLEX |
| | | | | | | | | | | (TRANSFERASE/SUBSTRATE)” |
| 259 | 1koa | | 128 | 553 | 2.60E−45 | | | 118.08 | TWITCHIN; CHAIN: NULL; | “KINASE KINASE, TWITCHIN, |
| | | | | | | | | | | INTRASTERIC REGULATION” |
| 259 | 1kob | A | 107 | 470 | 1.00E−40 | | | 105.15 | “TWITCHIN; CHAIN: A, B;” | “KINASE KINASE, TWITCHIN, |
| | | | | | | | | | | INTRASTERIC REGULATION” |
| 259 | 1qcf | A | 127 | 409 | 1.30E−80 | 0.54 | 1 | | HAEMATOPOETIC CELL | “TYROSINE KINASE TYROSINE KINASE- |
| | | | | | | | | | KINASE (HCK); CHAIN: A; | INHIBITOR COMPLEX, DOWN- |
| | | | | | | | | | | REGULATED KINASE, 2 ORDERED |
| | | | | | | | | | | ACTIVATION LOOP” |
| 259 | 1qcf | A | 52 | 413 | 6.80E−70 | 0.39 | 1 | | HAEMATOPOETIC CELL | “TYROSINE KINASE TYROSINE KINASE- |
| | | | | | | | | | KINASE (HCK); CHAIN: A; | INHIBITOR COMPLEX, DOWN- |
| | | | | | | | | | | REGULATED KINASE, 2 ORDERED |
| | | | | | | | | | | ACTIVATION LOOP” |
| 259 | 1qcf | A | 1 | 415 | 6.80E−70 | | | 138.77 | HAEMATOPOETIC CELL | “TYROSINE KINASE TYROSINE KINASE- |
| | | | | | | | | | KINASE (HCK); CHAIN: A; | INHIBITOR COMPLEX, DOWN- |
| | | | | | | | | | | REGULATED KINASE, 2 ORDERED |
| | | | | | | | | | | ACTIVATION LOOP” |
| 259 | 1qly | A | 54 | 113 | 1.30E−15 | 0.32 | 0.62 | | TYROSINE-PROTEIN | “TYROSINE-PROTEIN KINASE BRUTONS |
| | | | | | | | | | KINASE BTK; CHAIN: A; | TYROSINE KINASE, B CELL PROGENITOR |
| | | | | | | | | | | KINASE, TRANSFERASE, TYROSINE- |
| | | | | | | | | | | PROTEIN KINASE, PHOSPHORYLATION, 2 |
| | | | | | | | | | | SH3 DOMAIN” |
| 259 | 1qpc | A | 138 | 409 | 3.90E−80 | 0.68 | 1 | | LCK KINASE; CHAIN: A; | TRANSFERASE ALPHA BETA FOLD |
| 259 | 1qpc | A | 135 | 411 | 1.20E−64 | 0.63 | 1 | | LCK KINASE; CHAIN: A; | TRANSFERASE ALPHA BETA FOLD |
| 259 | 1sem | A | 55 | 113 | 5.20E−17 | 0.54 | 1 | | “SEM-5; ISEM 3 CHAIN: A, | “SIGNAL TRANSDUCTION PROTEIN SRC- |
| | | | | | | | | | B; ISEM 5 10-RESIDUE | HOMOLOGY 3 (SH3) DOMAIN, PEPTIDE- |
| | | | | | | | | | PROLINE-RICH PEPTIDE | BINDING PROTEIN, 1SEM 18 2 GUANINE |
| | | | | | | | | | FROM MSOS 1SEM 8 CHAIN: | NUCLEOTIDE EXCHANGE FACTOR 1SEM |
| | | | | | | | | | C, D 1SEM 10” | 19” |
| 259 | 1tki | A | 146 | 400 | 7.80E−45 | 0.34 | 0.77 | | “TITIN; CHAIN: A, B;” | “SERINE KINASE SERINE KINASE, TITIN, |
| | | | | | | | | | | MUSCLE, AUTOINHIBITION” |
| 259 | 1vr2 | A | 138 | 409 | 1.30E−71 | 0.58 | 1 | | VASCULAR ENDOTHELIAL | TRANSFERASE KDR; TYROSINE KINASE |
| | | | | | | | | | GROWTH FACTOR | |
| | | | | | | | | | RECEPTOR CHAIN: A; | |
| 261 | 1mgs | A | 55 | 127 | 1.70E−21 | 0.41 | 1 | | | “CHEMOKINE(GROWTH FACTOR) |
| | | | | | | | | | | HUMAN MELANOMA GROWTH |
| | | | | | | | | | | STIMULATING ACTIVITY |
| | | | | | | | | | | (MGSA/GRO_ALPHA) 1MGS 3 (NMR, 25 |
| | | | | | | | | | | STRUCTURES) 1MGS 4” |
| 261 | 1mgs | A | 55 | 127 | 1.70E−21 | | | 78.78 | | “CHEMOKINE(GROWTH FACTOR) |
| | | | | | | | | | | HUMAN MELANOMA GROWTH |
| | | | | | | | | | | STIMULATING ACTIVITY |
| | | | | | | | | | | (MGSA/GRO_ALPHA) 1MGS 3 (NMR, 25 |
| | | | | | | | | | | STRUCTURES) 1MGS 4” |
| 261 | 1mi2 | A | 55 | 127 | 5.10E−20 | 0.38 | 1 | | “MACROPHAGE | “CYTOKINE MIP-2, CHEMOKINE, NMR, |
| | | | | | | | | | INFLAMMATORY PROTEIN- | CYTOKINE” |
| | | | | | | | | | 2; CHAIN: A, B;” | |
| 261 | 1mi2 | A | 55 | 126 | 5.10E−20 | | | 70.46 | “MACROPHAGE | “CYTOKINE MIP-2, CHEMOKINE, NMR, |
| | | | | | | | | | INFLAMMATORY PROTEIN- | CYTOKINE” |
| | | | | | | | | | 2; CHAIN: A, B;” | |
| 261 | 1qnk | A | 59 | 127 | 1.00E−19 | 0.62 | 1 | | “GROB[5-73]; CHAIN: A, B;” | “CHEMOKINE CHEMOKINE 15-O, HUMAN |
| | | | | | | | | | | CHEMOKINE GROB[5-73], CXC |
| | | | | | | | | | | CHEMOKINE” |
| 261 | 1rod | A | 60 | 127 | 2.60E−27 | 0.29 | 1 | | “CHIMERIC PROTEIN OF | “CHEMOKINE CHI1, CIL-8M, NAP-1/M12; |
| | | | | | | | | | INTERLEUKIN 8 AND | CYTOKINE, CHEMOTAXIS, |
| | | | | | | | | | HUMAN CHAIN: A, B;” | INFLAMMATORY RESPONSE, |
| | | | | | | | | | | CHEMOKINE” |
| 261 | 1rod | A | 57 | 127 | 2.60E−27 | | | 66.9 | “CHIMERIC PROTEIN OF | “CHEMOKINE CHI1, CIL-8M, NAP-1/M12; |
| | | | | | | | | | INTERLEUKIN 8 AND | CYTOKINE, CHEMOTAXIS, |
| | | | | | | | | | HUMAN CHAIN: A, B;” | INFLAMMATORY RESPONSE, |
| | | | | | | | | | | CHEMOKINE” |
| 261 | 1tvx | B | 54 | 121 | 1.20E−22 | 0.66 | 1 | | “NEUTROPHIL ACTIVATING | CYTOKINE NAP-2; CYTOKINE |
| | | | | | | | | | PEPTIDE 2 VARIANT; | |
| | | | | | | | | | CHAIN: A, B, C, D;” | |
| 261 | 1tvx | A | 61 | 121 | 2.60E−21 | 0.56 | 1 | | “NEUTROPHIL ACTIVATING | CYTOKINE NAP-2; CYTOKINE |
| | | | | | | | | | PEPTIDE 2 VARIANT; | |
| | | | | | | | | | CHAIN: A, B, C, D;” | |
| 261 | 1tvx | B | 55 | 119 | 3.40E−19 | 0.27 | 1 | | “NEUTROPHIL ACTIVATING | CYTOKINE NAP-2; CYTOKINE |
| | | | | | | | | | PEPTIDE 2 VARIANT; | |
| | | | | | | | | | CHAIN: A, B, C, D;” | |
| 261 | 1tvx | A | 61 | 119 | 1.70E−18 | 0.79 | 1 | | “NEUTROPHIL ACTIVATING | CYTOKINE NAP-2; CYTOKINE |
| | | | | | | | | | PEPTIDE 2 VARIANT; | |
| | | | | | | | | | CHAIN: A, B, C, D;” | |
| 261 | 1tvx | B | 54 | 124 | 1.20E−22 | | | 106.99 | “NEUTROPHIL ACTIVATING | CYTOKINE NAP-2; CYTOKINE |
| | | | | | | | | | PEPTIDE 2 VARIANT; | |
| | | | | | | | | | CHAIN: A, B, C, D;” | |
| 261 | 1tvx | A | 61 | 124 | 2.60E−21 | | | 95.42 | “NEUTROPHIL ACTIVATING | CYTOKINE NAP-2; CYTOKINE |
| | | | | | | | | | PEPTIDE 2 VARIANT; | |
| | | | | | | | | | CHAIN: A, B, C, D;” | |
| 262 | 1a17 | | 44 | 188 | 6.80E−28 | 0.11 | 0.42 | | SERINE/THREONINE | “HYDROLASE TETRATRICOPEPTIDE, TRP; |
| | | | | | | | | | PROTEIN PHOSPHATASE 5; | HYDROLASE, PHOSPHATASE, PROTEIN- |
| | | | | | | | | | CHAIN: NULL; | PROTEIN INTERACTIONS, TPR, 2 SUPER- |
| | | | | | | | | | | HELIX, X-RAY STRUCTURE” |
| 262 | 1a17 | | 8 | 134 | 1.50E−18 | 0.58 | 0.71 | | SERINE/THREONINE | “HYDROLASE TETRATRICOPEPTIDE, TRP; |
| | | | | | | | | | PROTEIN PHOSPHATASE 5; | HYDROLASE, PHOSPHATASE, PROTEIN- |
| | | | | | | | | | CHAIN: NULL; | PROTEIN INTERACTIONS, TPR, 2 SUPER- |
| | | | | | | | | | | HELIX, X-RAY STRUCTURE” |
| 262 | 1a17 | | 2 | 100 | 1.00E−08 | 0.34 | 0.6 | | SERINE/THREONINE | “HYDROLASE TETRATRICOPEPTIDE, TRP; |
| | | | | | | | | | PROTEIN PHOSPHATASE 5; | HYDROLASE, PHOSPHATASE, PROTEIN- |
| | | | | | | | | | CHAIN: NULL; | PROTEIN INTERACTIONS, TPR, 2 SUPER- |
| | | | | | | | | | | HELIX, X-RAY STRUCTURE” |
| 262 | 1d8d | A | 14 | 113 | 6.50E−09 | −0.07 | 0 | | FARNESYLTRANSFERASE | “TRANSFERASE FTASE; FTASE; FTASE, |
| | | | | | | | | | (ALPHA SUBUNIT); CHAIN: | PFT, PFTASE, FARNESYLTRANSFERASE, |
| | | | | | | | | | A; | FARNESYL 2 TRANSFERASE, CAAX, RAS, |
| | | | | | | | | | FARNESYLTRANSFERASE | CANCER” |
| | | | | | | | | | (BETA SUBUNIT); CHAIN: B; | |
| | | | | | | | | | K-RAS4B PEPTIDE | |
| | | | | | | | | | SUBSTRATE; CHAIN: P; | |
| 262 | 1d8d | A | 55 | 188 | 1.40E−08 | −0.09 | 0.03 | | FARNESYLTRANSFERASE | “TRANSFERASE FTASE; FTASE; FTASE, |
| | | | | | | | | | (ALPHA SUBUNIT); CHAIN: | PFT, PFTASE, FARNESYLTRANSFERASE, |
| | | | | | | | | | A; | FARNESYL 2 TRANSFERASE, CAAX, RAS, |
| | | | | | | | | | FARNESYLTRANSFERASE | CANCER” |
| | | | | | | | | | (BETA SUBUNIT); CHAIN: B; | |
| | | | | | | | | | K-RAS4B PEPTIDE | |
| | | | | | | | | | SUBSTRATE; CHAIN: P; | |
| 262 | 1e53 | B | 45 | 192 | 1.20E−18 | 0.04 | 1 | | RAS-RELATED C3 | “SIGNALLING COMPLEX RAC1; P67PHOX; |
| | | | | | | | | | BOTULINUM TOXIN | SIGNALLING COMPLEX, GTPASE, NADPH |
| | | | | | | | | | SUBSTRATE 1; CHAIN: A; | OXIDASE, PROTEIN-PROTEIN 2 |
| | | | | | | | | | NEUTROPHIL CYTOSOL | COMPLEX, TPR MOTIF” |
| | | | | | | | | | FACTOR 2 (NCF-2) CHAIN: | |
| | | | | | | | | | B; | |
| 262 | 1e53 | B | 6 | 116 | 5.10E−10 | −0.03 | 0.16 | | RAS-RELATED C3 | “SIGNALLING COMPLEX RAC1; P67PHOX; |
| | | | | | | | | | BOTULINUM TOXIN | SIGNALLING COMPLEX, GTPASE, NADPH |
| | | | | | | | | | SUBSTRATE 1; CHAIN: A; | OXIDASE, PROTEIN-PROTEIN 2 |
| | | | | | | | | | NEUTROPHIL CYTOSOL | COMPLEX, TPR MOTIF” |
| | | | | | | | | | FACTOR 2 (NCF-2) CHAIN: | |
| | | | | | | | | | B; | |
| 262 | 1e53 | B | 13 | 113 | 1.20E−07 | 0.31 | 1 | | RAS-RELATED C3 | “SIGNALLING COMPLEX RAC1; P67PHOX; |
| | | | | | | | | | BOTULINUM TOXIN | SIGNALLING COMPLEX, GTPASE, NADPH |
| | | | | | | | | | SUBSTRATE 1; CHAIN: A; | OXIDASE, PROTEIN-PROTEIN 2 |
| | | | | | | | | | NEUTROPHIL CYTOSOL | COMPLEX, TPR MOTIF” |
| | | | | | | | | | FACTOR 2 (NCF-2) CHAIN: | |
| | | | | | | | | | B; | |
| 262 | 1elr | A | 50 | 141 | 1.70E−19 | 0.04 | 0.12 | | TPR2A-DOMAIN OF HOP; | “CHAPERONE HOP, TPR-DOMAIN, |
| | | | | | | | | | CHAIN: A; HSP90-PEPTIDE | PEPTIDE-COMPLEX, HELICAL REPEAT, |
| | | | | | | | | | MEEVD; CHAIN: B; | HSP90, 2 PROTEIN BINDING” |
| 262 | 1elr | A | 14 | 107 | 5.10E−15 | 0.27 | 0.89 | | TPR2A-DOMAIN OF HOP; | “CHAPERONE HOP, TPR-DOMAIN, |
| | | | | | | | | | CHAIN: A; HSP90-PEPTIDE | PEPTIDE-COMPLEX, HELICAL REPEAT, |
| | | | | | | | | | MEEVD; CHAIN: B; | HSP90, 2 PROTEIN BINDING” |
| 262 | 1elr | A | 86 | 175 | 1.00E−14 | 0.28 | 0.53 | | TPR2A-DOMAIN OF HOP; | “CHAPERONE HOP, TPR-DOMAIN, |
| | | | | | | | | | CHAIN: A; HSP90-PEPTIDE | PEPTIDE-COMPLEX, HELICAL REPEAT, |
| | | | | | | | | | MEEVD; CHAIN: B; | HSP90, 2 PROTEIN BINDING” |
| 262 | 1elr | A | 2 | 73 | 1.20E−13 | 0.12 | 0.37 | | TPR2A-DOMAIN OF HOP; | “CHAPERONE HOP, TPR-DOMAIN, |
| | | | | | | | | | CHAIN: A; HSP90-PEPTIDE | PEPTIDE-COMPLEX, HELICAL REPEAT, |
| | | | | | | | | | MEEVD; CHAIN: B; | HSP90, 2 PROTEIN BINDING” |
| 262 | 1elr | A | 9 | 123 | 3.90E−07 | 0.3 | 0.7 | | TPR2A-DOMAIN OF HOP; | “CHAPERONE HOP, TPR-DOMAIN, |
| | | | | | | | | | CHAIN: A; HSP90-PEPTIDE | PEPTIDE-COMPLEX, HELICAL REPEAT, |
| | | | | | | | | | MEEVD; CHAIN: B; | HSP90, 2 PROTEIN BINDING” |
| 262 | 1elw | A | 44 | 160 | 3.40E−24 | 0.12 | 0.39 | | “TPR1-DOMAIN OF HOP; | “CHAPERONE HOP, TPR-DOMAIN, |
| | | | | | | | | | CHAIN: A, B; HSC70- | PEPTIDE-COMPLEX, HELICAL REPEAT, |
| | | | | | | | | | PEPTIDE; CHAIN: C, D;” | HSC70, 2 HSP70, PROTEIN BINDING” |
| 262 | 1elw | A | 87 | 194 | 5.10E−18 | 0.26 | 0.69 | | “TPR1-DOMAIN OF HOP; | “CHAPERONE HOP, TPR-DOMAIN, |
| | | | | | | | | | CHAIN: A, B; HSC70- | PEPTIDE-COMPLEX, HELICAL REPEAT, |
| | | | | | | | | | PEPTIDE; CHAIN: C, D;” | HSC70, 2 HSP70, PROTEIN BINDING” |
| 262 | 1elw | A | 8 | 115 | 1.70E−12 | 0.31 | 0.6 | | “TPR1-DOMAIN OF HOP; | “CHAPERONE HOP, TPR-DOMAIN, |
| | | | | | | | | | CHAIN: A, B; HSC70- | PEPTIDE-COMPLEX, HELICAL REPEAT, |
| | | | | | | | | | PEPTIDE; CHAIN: C, D;” | HSC70, 2 HSP70, PROTEIN BINDING” |
| 262 | 1elw | A | 2 | 86 | 3.40E−09 | 0.21 | 0.34 | | “TPR1-DOMAIN OF HOP; | “CHAPERONE HOP, TPR-DOMAIN, |
| | | | | | | | | | CHAIN: A, B; HSC70- | PEPTIDE-COMPLEX, HELICAL REPEAT, |
| | | | | | | | | | PEPTIDE; CHAIN: C, D;” | HSC70, 2 HSP70, PROTEIN BINDING” |
| 262 | 1fch | A | 2 | 184 | 6.80E−28 | 0.19 | 0.94 | | “PEROXISOMAL | “SIGNALING PROTEIN PEROXISMORE |
| | | | | | | | | | TARGETING SIGNAL 1 | RECEPTOR 1, PTS1-BP, PEROXIN-5, PTS1 |
| | | | | | | | | | RECEPTOR; CHAIN: A, B; | PROTEIN-PEPTIDE COMPLEX, |
| | | | | | | | | | PTS1-CONTAINING | TETRATRICOPEPTIDE REPEAT, TPR, 2 |
| | | | | | | | | | PEPTIDE; CHAIN: C, D;” | HELICAL REPEAT” |
| 262 | 1qqe | A | 21 | 131 | 7.80E−05 | 0.15 | 0.62 | | VESICULAR TRANSPORT | “PROTEIN TRANSPORT HELIX-TURN- |
| | | | | | | | | | PROTEIN SEC17; CHAIN: A; | HELIX TPR-LIKE REPEAT, PROTEIN |
| | | | | | | | | | | TRANSPORT” |
| 263 | 1a25 | A | 23 | 148 | 5.10E−28 | 0.51 | 0.92 | | “PROTEIN KINASE C | “CALCIUM-BINDING PROTEIN CALB; |
| | | | | | | | | | (BETA); CHAIN: A, B;” | CALCIUM++/PHOSPHOLIPID BINDING |
| | | | | | | | | | | PROTEIN, 2 CALCIUM-BINDING PROTEIN” |
| 263 | 1byn | A | 23 | 143 | 1.00E−30 | 0.26 | 0.99 | | SYNAPTOTAGMIN I; CHAIN: | “ENDOCYTOSIS/EXOCYTOSIS |
| | | | | | | | | | A; | SYNAPTOTAGMIN, C2-DOMAIN, |
| | | | | | | | | | | EXOCYTOSIS, NEUROTRANSMITTER 2 |
| | | | | | | | | | | RELEASE, ENDOCYTOSIS/EXOCYTOSIS” |
| 263 | 1cjy | A | 41 | 144 | 3.90E−21 | 0.02 | 0.24 | | “CYTOSOLIC | “HYDROLASE CPLA2; PHOSPHOLIPASE, |
| | | | | | | | | | PHOSPHOLIPASE A2; | LIPID-BINDING, HYDROLASE” |
| | | | | | | | | | CHAIN: A, B;” | |
| 263 | 1djx | B | 4 | 159 | 3.40E−27 | 0.19 | −0.05 | | “PHOSPHOINOSITIDE- | “LIPID DEGRADATION PLC-D1; |
| | | | | | | | | | SPECIFIC PHOSPHOLIPASE | PHOSPHORIC DIESTER HYDROLASE, |
| | | | | | | | | | C, CHAIN: A, B;” | HYDROLASE, LIPID DEGRADATION, 2 |
| | | | | | | | | | | TRANSDUCER, CALCIUM-BINDING, |
| | | | | | | | | | | PHOSPHOLIPASE C, 3 |
| | | | | | | | | | | PHOSPHOINOSITIDE-SPECIFIC” |
| 263 | 1djx | A | 4 | 159 | 3.40E−27 | 0.16 | −0.11 | | “PHOSPHOINOSITIDE- | “LIPID DEGRADATION PLC-D1; |
| | | | | | | | | | SPECIFIC PHOSPHOLIPASE | PHOSPHORIC DIESTER HYDROLASE, |
| | | | | | | | | | C, CHAIN: A, B;” | HYDROLASE, LIPID DEGRADATION, 2 |
| | | | | | | | | | | TRANSDUCER, CALCIUM-BINDING, |
| | | | | | | | | | | PHOSPHOLIPASE C, 3 |
| | | | | | | | | | | PHOSPHOINOSITIDE-SPECIFIC” |
| 263 | 1dqv | A | 25 | 170 | 1.50E−35 | 0.05 | 0.63 | | SYNAPTOTAGMIN III; | “ENDOCYTOSIS/EXOCYTOSIS BETA |
| | | | | | | | | | CHAIN: A; | SANDWICH, CALCIUM ION, C2 DOMAIN” |
| 263 | 1dsy | A | 23 | 154 | 6.80E−30 | 0.57 | 0.96 | | “PROTEIN KINASE C, | “TRANSFERASE CALCIUM++, |
| | | | | | | | | | ALPHA TYPE; CHAIN: A;” | PHOSPHOLIPID BINDING PROTEIN, |
| | | | | | | | | | | CALCIUM-BINDING 2 PROTEIN, |
| | | | | | | | | | | PHOSPHATIDYLSERINE, PROTEIN |
| | | | | | | | | | | KINASE C” |
| 263 | 1rlw | | 40 | 141 | 2.60E−22 | 0.21 | 0.49 | | PHOSPHOLIPASE A2; | “HYDROLASE CALB DOMAIN; |
| | | | | | | | | | CHAIN: NULL; | HYDROLASE, C2 DOMAIN, CALB |
| | | | | | | | | | | DOMAIN” |
| 263 | 1rsy | | 23 | 143 | 1.00E−30 | 0.24 | 0.82 | | | CALCIUM/PHOSPHOLIPID BINDING |
| | | | | | | | | | | PROTEIN SYNAPTOTAGMIN I (FIRST C2 |
| | | | | | | | | | | DOMAIN) (CALB) 1RSY 3 |
| 263 | 3rpb | A | 25 | 151 | 1.70E−24 | 0.16 | 0.17 | | RABPHILIN 3-A; CHAIN: A; | “ENDOCYTOSIS/EXOCYTOSIS C2- |
| | | | | | | | | | | DOMAINS, C2B-DOMAIN, RABPHILIN, |
| | | | | | | | | | | ENDOCYTOSIS/EXOCYTOSIS” |
| 264 | 1awj | | 236 | 321 | 1.30E−17 | 0.01 | 0.03 | | JTK; CHAIN: NULL; | “TRANSFERASE IL-2-INDUCIBLE T-CELL |
| | | | | | | | | | | KINASE; TRANSFERASE, REGULATORY |
| | | | | | | | | | | INTRAMOLECULAR COMPLEX, KINASE” |
| 264 | 1aww | | 258 | 321 | 1.30E−16 | 0.31 | 0.81 | | BRUTON'S TYROSINE | “TRANSFERASE ATK, AMGX1, BPK; |
| | | | | | | | | | KINASE; CHAIN: NULL; | TYROSINE KINASE, X-LINKED |
| | | | | | | | | | | AGAMMAGLOBULINEMIA, XLA, BTK, |
| | | | | | | | | | | SH3 2 DOMAIN, TRANSFERASE” |
| 264 | 1aze | A | 267 | 322 | 7.80E−19 | 0.83 | 0.96 | | GRB2; CHAIN: A; SOS; | “COMPLEX (ADAPTOR PROTEIN/PEPTIDE) |
| | | | | | | | | | CHAIN: B; | ASH, GROWTH FACTOR RECEPTOR- |
| | | | | | | | | | | BOUND PROTEIN 2; COMPLEX (ADAPTOR |
| | | | | | | | | | | PROTEIN/PEPTIDE), SH3 DOMAIN, 2 |
| | | | | | | | | | | GUANINE-NUCLEOTIDE RELEASING |
| | | | | | | | | | | FACTOR” |
| 264 | 1csk | A | 267 | 322 | 1.30E−15 | 0.05 | 1 | | | PHOSPHOTRANSFERASE C-SRC KINASE |
| | | | | | | | | | | (SH3 DOMAIN) (E.C.2.7.1.112) 1CSK 3 |
| 264 | 1gbq | A | 267 | 322 | 1.00E−17 | 0.74 | 1 | | GRB2; CHAIN: A; SOS-1; | “COMPLEX (SIGNAL |
| | | | | | | | | | CHAIN: B; | TRANSDUCTION/PEPTIDE) COMPLEX |
| | | | | | | | | | | (SIGNAL TRANSDUCTION/PEPTIDE), SH3 |
| | | | | | | | | | | DOMAIN” |
| 264 | 1gbr | A | 258 | 320 | 1.30E−17 | 0.86 | 0.75 | | | “SIGNAL TRANSDUCTION PROTEIN |
| | | | | | | | | | | GROWTH FACTOR RECEPTOR-BOUND |
| | | | | | | | | | | PROTEIN 2 (GRB2, N-TERMINAL 1GBR 3 |
| | | | | | | | | | | SH3 DOMAIN) COMPLEXED WITH SOS-A |
| | | | | | | | | | | PEPTIDE 1GBR 4 (NMR, 29 STRUCTURES) |
| | | | | | | | | | | 1GBR 5” |
| 264 | 1gfc | | 269 | 321 | 3.90E−17 | 0.86 | 1 | | | “ADAPTOR PROTEIN CONTAINING SH2 |
| | | | | | | | | | | AND SH3 GROWTH FACTOR RECEPTOR- |
| | | | | | | | | | | BOUND PROTEIN 2 (GRB2) 1GFC 3 (C- |
| | | | | | | | | | | TERMINAL SH3 DOMAIN) (NMR, |
| | | | | | | | | | | MINIMIZED MEAN STRUCTURE) 1GFC 4” |
| 264 | 1gfc | | 265 | 323 | 3.90E−17 | | | 51.2 | | “ADAPTOR PROTEIN CONTAINING SH2 |
| | | | | | | | | | | AND SH3 GROWTH FACTOR RECEPTOR- |
| | | | | | | | | | | BOUND PROTEIN 2 (GRB2) 1GFC 3 (C- |
| | | | | | | | | | | TERMINAL SH3 DOMAIN) (NMR, |
| | | | | | | | | | | MINIMIZED MEAN STRUCTURE) 1GFC 4” |
| 264 | 1gri | A | 239 | 321 | 1.30E−15 | 0.12 | 0.89 | | “GROWTH FACTOR BOUND | “SIGNAL TRANSDUCTION ADAPTOR SH2, |
| | | | | | | | | | PROTEIN 2; 1GRI 5 CHAIN: | SH3 1GRI 14” |
| | | | | | | | | | A, B; 1GRI 6” | |
| 264 | 1nlo | C | 271 | 320 | 2.60E−14 | 0.14 | 0.98 | | C-SRC; CHAIN: C; NL1 (MN7- | “COMPLEX (TRANSFERASE/PEPTIDE) |
| | | | | | | | | | MN2-MN1-PLPPLP); CHAIN: | SRC, SH3 DOMAIN, LIGANDS, NON- |
| | | | | | | | | | N; | PEPTIDE ELEMENTS, 2 COMPLEX |
| | | | | | | | | | | (TRANSFERASE/PEPTIDE)” |
| 264 | 1sem | A | 269 | 321 | 1.30E−17 | 0.78 | 1 | | “SEM-5; 1SEM 3 CHAIN: A, | “SIGNAL TRANSDUCTION PROTEIN SRC- |
| | | | | | | | | | B; 1SEM 5 10-RESIDUE | HOMOLOGY 3 (SH3) DOMAIN, PEPTIDE- |
| | | | | | | | | | PROLINE-RICH PEPTIDE | BINDING PROTEIN, 1SEM 18 2 GUANINE |
| | | | | | | | | | FROM MSOS 1SEM 8 CHAIN: | NUCLEOTIDE EXCHANGE FACTOR 1SEM |
| | | | | | | | | | C, D 1SEM 10” | 19” |
| 264 | 1sem | A | 265 | 323 | 1.30E−17 | | | 53.02 | “SEM-5; 1SEM 3 CHAIN: A, | “SIGNAL TRANSDUCTION PROTEIN SRC- |
| | | | | | | | | | B; 1SEM 5 10-RESIDUE | HOMOLOGY 3 (SH3) DOMAIN, PEPTIDE- |
| | | | | | | | | | PROLINE-RICH PEPTIDE | BINDING PROTEIN, 1SEM 18 2 GUANINE |
| | | | | | | | | | FROM MSOS 1SEM 8 CHAIN: | NUCLEOTIDE EXCHANGE FACTOR 1SEM |
| | | | | | | | | | C, D 1SEM 10” | 19” |
| 265 | 1a17 | | 415 | 573 | 6.50E−16 | 0.09 | 0.89 | | SERINE/THREONINE | “HYDROLASE TETRATRICOPEPTIDE, TRP; |
| | | | | | | | | | PROTEIN PHOSPHATASE 5; | HYDROLASE, PHOSPHATASE, PROTEIN- |
| | | | | | | | | | CHAIN: NULL; | PROTEIN INTERACTIONS, TPR, 2 SUPER- |
| | | | | | | | | | | HELIX, X-RAY STRUCTURE” |
| 265 | 1a17 | | 307 | 488 | 3.90E−11 | 0.02 | −0.09 | | SERINE/THREONINE | “HYDROLASE TETRATRICOPEPTIDE, TRP; |
| | | | | | | | | | PROTEIN PHOSPHATASE 5; | HYDROLASE, PHOSPHATASE, PROTEIN- |
| | | | | | | | | | CHAIN: NULL; | PROTEIN INTERACTIONS, TPR, 2 SUPER- |
| | | | | | | | | | | HELIX, X-RAY STRUCTURE” |
| 265 | 1a17 | | 265 | 444 | 1.30E−10 | 0.1 | 0.05 | | SERINE/THREONINE | “HYDROLASE TETRATRICOPEPTIDE, TRP; |
| | | | | | | | | | PROTEIN PHOSPHATASE 5; | HYDROLASE, PHOSPHATASE, PROTEIN- |
| | | | | | | | | | CHAIN: NULL; | PROTEIN INTERACTIONS, TPR, 2 SUPER- |
| | | | | | | | | | | HELIX, X-RAY STRUCTURE” |
| 265 | 1a17 | | 499 | 609 | 3.40E−07 | 0.27 | 0.12 | | SERINE/THREONINE | “HYDROLASE TETRATRICOPEPTIDE, TRP; |
| | | | | | | | | | PROTEIN PHOSPHATASE 5; | HYDROLASE, PHOSPHATASE, PROTEIN- |
| | | | | | | | | | CHAIN: NULL; | PROTEIN INTERACTIONS, TPR, 2 SUPER- |
| | | | | | | | | | | HELIX, X-RAY STRUCTURE” |
| 265 | 1a17 | | 371 | 499 | 0.00068 | 0.14 | 0.77 | | SERINE/THREONINE | “HYDROLASE TETRATRICOPEPTIDE, TRP; |
| | | | | | | | | | PROTEIN PHOSPHATASE 5; | HYDROLASE, PHOSPHATASE, PROTEIN- |
| | | | | | | | | | CHAIN: NULL; | PROTEIN INTERACTIONS, TPR, 2 SUPER- |
| | | | | | | | | | | HELIX, X-RAY STRUCTURE” |
| 265 | 1b43 | A | 528 | 584 | 0.0026 | −0.54 | 0.04 | | “FEN-1; CHAIN: A, B;” | “TRANSFERASE NUCLEASE, DNA |
| | | | | | | | | | | REPAIR, DNA REPLICATION, |
| | | | | | | | | | | TRANSFERASE” |
| 265 | 1cii | | 56 | 610 | 1.20E−11 | | | 95.9 | COLICIN IA; CHAIN: NULL; | “TRANSMEMBRANE PROTEIN COLICIN, |
| | | | | | | | | | | BACTERIOCIN, ION CHANNEL |
| | | | | | | | | | | FORMATION, TRANSMEMBRANE 2 |
| | | | | | | | | | | PROTEIN” |
| 265 | 1d8d | A | 340 | 533 | 5.20E−09 | −0.18 | 0.18 | | FARNESYLTRANSFERASE | “TRANSFERASE FTASE; FTASE; FTASE, |
| | | | | | | | | | (ALPHA SUBUNIT); CHAIN: | PFT, PFTASE, FARNESYLTRANSFERASE, |
| | | | | | | | | | A; | FARNESYL 2 TRANSFERASE, CAAX, RAS, |
| | | | | | | | | | FARNESYLTRANSFERASE | CANCER” |
| | | | | | | | | | (BETA SUBUNIT); CHAIN: B; | |
| | | | | | | | | | K-RAS4B PEPTIDE | |
| | | | | | | | | | SUBSTRATE; CHAIN: P; | |
| 265 | 1e53 | B | 415 | 532 | 6.50E−11 | 0.17 | 1 | | RAS-RELATED C3 | “SIGNALLING COMPLEX RAC1; P67PHOX; |
| | | | | | | | | | BOTULINUM TOXIN | SIGNALLING COMPLEX, GTPASE, NADPH |
| | | | | | | | | | SUBSTRATE 1; CHAIN: A; | OXIDASE, PROTEIN-PROTEIN 2 |
| | | | | | | | | | NEUTROPHIL CYTOSOL | COMPLEX, TPR MOTIF” |
| | | | | | | | | | FACTOR 2 (NCF-2) CHAIN: | |
| | | | | | | | | | B; | |
| 265 | 1e53 | B | 340 | 483 | 3.90E−05 | 0.38 | 0.31 | | RAS-RELATED C3 | “SIGNALLING COMPLEX RAC1; P67PHOX; |
| | | | | | | | | | BOTULINUM TOXIN | SIGNALLING COMPLEX, GTPASE, NADPH |
| | | | | | | | | | SUBSTRATE 1; CHAIN: A; | OXIDASE, PROTEIN-PROTEIN 2 |
| | | | | | | | | | NEUTROPHIL CYTOSOL | COMPLEX, TPR MOTIF” |
| | | | | | | | | | FACTOR 2 (NCF-2) CHAIN: | |
| | | | | | | | | | B; | |
| 265 | 1e53 | B | 504 | 610 | 0.0012 | 0.1 | 0.04 | | RAS-RELATED C3 | “SIGNALLING COMPLEX RAC1; P67PHOX; |
| | | | | | | | | | BOTULINUM TOXIN | SIGNALLING COMPLEX, GTPASE, NADPH |
| | | | | | | | | | SUBSTRATE 1; CHAIN: A; | OXIDASE, PROTEIN-PROTEIN 2 |
| | | | | | | | | | NEUTROPHIL CYTOSOL | COMPLEX, TPR MOTIF” |
| | | | | | | | | | FACTOR 2 (NCF-2) CHAIN: | |
| | | | | | | | | | B; | |
| 265 | 1e53 | B | 223 | 313 | 0.0052 | 0.01 | 0.45 | | RAS-RELATED C3 | “SIGNALLING COMPLEX RAC1; P67PHOX; |
| | | | | | | | | | BOTULINUM TOXIN | SIGNALLING COMPLEX, GTPASE, NADPH |
| | | | | | | | | | SUBSTRATE 1; CHAIN: A; | OXIDASE, PROTEIN-PROTEIN 2 |
| | | | | | | | | | NEUTROPHIL CYTOSOL | COMPLEX, TPR MOTIF” |
| | | | | | | | | | FACTOR 2 (NCF-2) CHAIN: | |
| | | | | | | | | | B; | |
| 265 | 1elr | A | 373 | 511 | 2.60E−15 | 0.16 | 1 | | TPR2A-DOMAIN OF HOP; | “CHAPERONE HOP, TPR-DOMAIN, |
| | | | | | | | | | CHAIN: A; HSP90-PEPTIDE | PEPTIDE-COMPLEX, HELICAL REPEAT, |
| | | | | | | | | | MEEVD; CHAIN: B; | HSP90, 2 PROTEIN BINDING” |
| 265 | 1elr | A | 457 | 577 | 2.60E−15 | 0.29 | 0.99 | | TPR2A-DOMAIN OF HOP; | “CHAPERONE HOP, TPR-DOMAIN, |
| | | | | | | | | | CHAIN: A; HSP90-PEPTIDE | PEPTIDE-COMPLEX, HELICAL REPEAT, |
| | | | | | | | | | MEEVD; CHAIN: B; | HSP90, 2 PROTEIN BINDING” |
| 265 | 1elr | A | 223 | 344 | 2.60E−12 | 0.08 | 0.98 | | TPR2A-DOMAIN OF HOP; | “CHAPERONE HOP, TPR-DOMAIN, |
| | | | | | | | | | CHAIN: A; HSP90-PEPTIDE | PEPTIDE-COMPLEX, HELICAL REPEAT, |
| | | | | | | | | | MEEVD; CHAIN: B; | HSP90, 2 PROTEIN BINDING” |
| 265 | 1elr | A | 307 | 446 | 5.20E−11 | 0.12 | 0.24 | | TPR2A-DOMAIIN OF HOP; | “CHAPERONE HOP, TPR-DOMAIN, |
| | | | | | | | | | CHAIN: A; HSP90-PEPTIDE | PEPTIDE-COMPLEX, HELICAL REPEAT, |
| | | | | | | | | | MEEVD; CHAIN: B; | HSP90, 2 PROTEIN BINDING” |
| 265 | 1elr | A | 268 | 404 | 1.70E−05 | −0.28 | 0.12 | | TPR2A-DOMAIN OF HOP; | “CHAPERONE HOP, TPR-DOMAIN, |
| | | | | | | | | | CHAIN: A; HSP90-PEPTIDE | PEPTIDE-COMPLEX, HELICAL REPEAT, |
| | | | | | | | | | MEEVD; CHAIN: B; | HSP90, 2 PROTEIN BINDING” |
| 265 | 1elw | A | 371 | 511 | 5.20E−14 | 0.43 | 0.95 | | “TPR1-DOMAIN OF HOP; | “CHAPERONE HOP, TPR-DOMAIN, |
| | | | | | | | | | CHAIN: A, B; HSC70- | PEPTIDE-COMPLEX, HELICAL REPEAT, |
| | | | | | | | | | PEPTIDE; CHAIN: C, D; ” | HSC70, 2 HSP70, PROTEIN BINDING” |
| 265 | 1elw | A | 457 | 570 | 6.50E−13 | 0.13 | 0.93 | | “TPR1-DOMAIN OF HOP; | “CHAPERONE HOP, TPR-DOMAIN, |
| | | | | | | | | | CHAIN: A, B; HSC70- | PEPTIDE-COMPLEX, HELICAL REPEAT, |
| | | | | | | | | | PEPTIDE; CHAIN: C, D; ” | HSC70, 2 HSP70, PROTEIN BINDING” |
| 265 | 1elw | A | 201 | 319 | 2.60E−07 | 0 | 0.25 | | “TPR1-DOMAIN OF HOP; | “CHAPERONE HOP, TPR-DOMAIN, |
| | | | | | | | | | CHAIN: A, B; HSC70- | PEPTIDE-COMPLEX, HELICAL REPEAT, |
| | | | | | | | | | PEPTIDE; CHAIN: C, D;” | HSC70, 2 HSP70, PROTEIN BINDING” |
| 265 | 1elw | A | 455 | 587 | 3.40E−06 | 0.19 | 0.57 | | “TPR1-DOMAIN OF HOP; | “CHAPERONE HOP, TPR-DOMAIN, |
| | | | | | | | | | CHAIN: A, B; HSC70- | PEPTIDE-COMPLEX, HELICAL REPEAT, |
| | | | | | | | | | PEPTIDE; CHAIN: C, D;” | HSC70, 2 HSP70, PROTEIN BINDING” |
| 265 | 1elw | A | 221 | 347 | 6.80E−06 | −0.13 | 0.07 | | “TPR1 -DOMAIN OF HOP; | “CHAPERONE HOP, TPR-DOMAIN, |
| | | | | | | | | | CHAIN: A, B; HSC70- | PEPTIDE-COMPLEX, HELICAL REPEAT, |
| | | | | | | | | | PEPTIDE; CHAIN: C, D;” | HSC70, 2 HSP70, PROTEIN BINDING” |
| 265 | 1elw | A | 367 | 453 | 0.00068 | −0.03 | 0.76 | | “TPR1-DOMAIN OF HOP; | “CHAPERONE HOP, TPR-DOMAIN, |
| | | | | | | | | | CHAIN: A, B; HSC70- | PEPTIDE-COMPLEX, HELICAL REPEAT, |
| | | | | | | | | | PEPTIDE; CHAIN: C, D;” | HSC70, 2 HSP70, PROTEIN BINDING” |
| 265 | 1elw | A | 376 | 505 | 0.0019 | 0.08 | 0.7 | | “TPR1-DOMAIN OF HOP; | “CHAPERONE HOP, TPR-DOMAIN, |
| | | | | | | | | | CHAIN: A, B; HSC70- | PEPTIDE-COMPLEX, HELICAL REPEAT, |
| | | | | | | | | | PEPTIDE; CHAIN: C, D;” | HSC70, 2 HSP70, PROTEIN BINDING” |
| 265 | 1fch | A | 209 | 577 | 1.30E−37 | 0.06 | 1 | | “PEROXISOMAL | “SIGNALING PROTEIN PEROXISMORE |
| | | | | | | | | | TARGETING SIGNAL 1 | RECEPTOR 1, PTS1-BP, PEROXIN-5, PTS1 |
| | | | | | | | | | RECEPTOR; CHAIN: A, B; | PROTEIN-PEPTIDE COMPLEX, |
| | | | | | | | | | PTS1-CONTAINING | TETRATRICOPEPTIDE REPEAT, TPR, 2 |
| | | | | | | | | | PEPTIDE; CHAIN: C, D;” | HELICAL REPEAT” |
| 265 | 1fch | A | 366 | 607 | 5.10E−14 | −0.29 | 0.64 | | “PEROXISOMAL | “SIGNALING PROTEIN PEROXISMORE |
| | | | | | | | | | TARGETING SIGNAL 1 | RECEPTOR 1, PTS1-BP, PEROXIN-5, PTS1 |
| | | | | | | | | | RECEPTOR; CHAIN: A, B; | PROTEIN-PEPTIDE COMPLEX, |
| | | | | | | | | | PTS1-CONTAINING | TETRATRICOPEPTIDE REPEAT, TPR, 2 |
| | | | | | | | | | PEPTIDE; CHAIN: C, D;” | HELICAL REPEAT” |
| 265 | 1qja | A | 310 | 497 | 1.70E−06 | −0.1 | 0.82 | | “14-3-3 PROTEIN ZETA; | “COMPLEX (SIGNAL |
| | | | | | | | | | CHAIN: A, B; | TRANSDUCTION/PEPTIDE) COMPLEX, 14- |
| | | | | | | | | | PHOSPHOPEPTIDE; CHAIN: | 3-3, PHOSPHOPEPTIDE, SIGNAL |
| | | | | | | | | | Q, R” | TRANSDUCTION” |
| 265 | 1qqe | A | 397 | 582 | 2.60E−22 | 0.17 | 0.76 | | VESICULAR TRANSPORT | “PROTEIN TRANSPORT HELIX-TURN- |
| | | | | | | | | | PROTEIN SEC17; CHAIN: A; | HELIX TPR-LIKE REPEAT, PROTEIN |
| | | | | | | | | | | TRANSPORT” |
| 266 | 1air | | 370 | 658 | 1.20E−22 | 0.26 | 0.19 | | PECTATE LYASE C; CHAIN: | “PECTATE CLEAVAGE PELC; PECTATE |
| | | | | | | | | | NULL; | CLEAVAGE, PECTINOLYITC ACTIVITY, |
| | | | | | | | | | | TRANS-ELIMINATION” |
| 266 | 1fqv | A | 71 | 118 | 1.50E−14 | −0.24 | 0.4 | | “SKP2; CHAIN: A, C, E, G, I, | “LIGASE CYCLIN A/CDK2-ASSOCIATED |
| | | | | | | | | | K, M, O; SKP1; CHAIN: B, D, | PROTEIN P45; CYCLIN A/CDK2- |
| | | | | | | | | | F, H, J, L, N, P;” | ASSOCIATED PROTEIN P19; SKP1, SKP2, |
| | | | | | | | | | | F-BOX, LRR, LEUCINE-RICH REPEAT, SCF, |
| | | | | | | | | | | UBIQUITIN, 2 E3, UBIQUITIN PROTEIN |
| | | | | | | | | | | LIGASE” |
| 266 | 1fs1 | A | 72 | 112 | 1.70E−13 | −0.28 | 0.82 | | “CYCLIN A/CDK2- | “LIGASE SKP2 F-BOX; SKP1; SKP1, SKP2, |
| | | | | | | | | | ASSOCIATED P19; CHAIN: | F-BOX, LRR, LEUCINE-RICH REPEAT, SCF, |
| | | | | | | | | | A, C; CYCLIN A/CDK2- | UBIQUITIN, 2 E3, UBIQUITIN PROTEIN |
| | | | | | | | | | ASSOCIATED P45; CHAIN: B, | LIGASE” |
| | | | | | | | | | D;” | |
| 266 | 1fs2 | A | 69 | 115 | 1.50E−14 | −0.32 | 0.53 | | “SKP2; CHAIN: A, C; SKP1; | “LIGASE CYCLIN A/CDK2-ASSOCIATED |
| | | | | | | | | | CHAIN: B, D;” | P45; CYCLIN A/CDK2-ASSOCIATED P19; |
| | | | | | | | | | | SKP1, SKP2, F-BOX, LRRS, LEUCINE-RICH |
| | | | | | | | | | | REPEATS, SCF, 2 UBIQUITIN, E3, |
| | | | | | | | | | | UBIQUITIN PROTEIN LIGASE” |
| 267 | 1btn | | 453 | 527 | 5.20E−14 | 0.53 | 0.6 | | BETA-SPECTRIN; 1BTN 4 | SIGNAL TRANSDUCTION PROTEIN |
| | | | | | | | | | CHAIN: NULL; 1BTN 5 | |
| 267 | 1dro | | 252 | 334 | 0.00013 | −0.15 | 0.63 | | BETA-SPECTRIN; 1DRO 6 | CYTOSKELETON |
| | | | | | | | | | CHAIN: NULL; 1DRO 7 | |
| 267 | 1ez3 | A | 639 | 726 | 5.20E−08 | 0.03 | −0.14 | | “SYNTAXIN-1A; CHAIN: A, | “ENDOCYTOSIS/EXOCYTOSIS |
| | | | | | | | | | B, C;” | SYNAPTOTAGMIN ASSOCIATED 35 KDA |
| | | | | | | | | | | PROTEIN, P35A, THREE HELIX BUNDLE” |
| 267 | 1fao | A | 446 | 530 | 6.50E−10 | 0.69 | 0.66 | | DUAL ADAPTOR OF | “SIGNALING PROTEIN DAPP1, PHISH, |
| | | | | | | | | | PHOSPHOTYROSINE AND 3- | BAM32; PLECKSTRIN, 3- |
| | | | | | | | | | CHAIN: A; | PHOSPHOINOSITIDES, INOSITOL |
| | | | | | | | | | | TETRAKISPHOSPHATE 2 SIGNAL |
| | | | | | | | | | | TRANSDUCTION PROTEIN, ADAPTOR |
| | | | | | | | | | | PROTEIN” |
| 267 | 1fb8 | A | 439 | 530 | 1.30E−11 | 0.33 | 0.57 | | DUAL ADAPTOR OF | “SIGNALING PROTEIN DAPP1, PHISH, |
| | | | | | | | | | PHOSPHOTYROSINE AND 3- | BAM32; PLECKSTRIN, 3- |
| | | | | | | | | | CHAIN: A; | PHOSPHOINOSITIDES, INOSITOL |
| | | | | | | | | | | TETRAKISPHOSPHATE 2 SIGNAL |
| | | | | | | | | | | TRANSDUCTION PROTEIN, ADAPTOR |
| | | | | | | | | | | PROTEIN” |
| 267 | 1fgy | A | 444 | 527 | 1.20E−12 | −0.36 | 0.1 | | GRP1; CHAIN: A; | SIGNALING PROTEIN ARF1 GUANINE |
| | | | | | | | | | | NUCLEOTIDE EXCHANGE FACTOR AND |
| | | | | | | | | | | PH DOMAIN |
| 267 | 1pls | | 249 | 345 | 3.90E−13 | 0.58 | 0.59 | | | “PHOSPHORYLATION PLECKSTRIN (N- |
| | | | | | | | | | | TERMINAL PLECKSTRIN HOMOLOGY |
| | | | | | | | | | | DOMAIN) MUTANT 1PLS 3 WITH LEU GLU |
| | | | | | | | | | | (HIS)6 ADDED TO THE C TERMINUS 1PLS |
| | | | | | | | | | | 4 (INS(G105-LEHHHHHH)) (NMR, 25 |
| | | | | | | | | | | STRUCTURES) 1PLS 5” |
| 267 | 1pls | | 439 | 527 | 3.90E−11 | 0.26 | 0.41 | | | “PHOSPHORYLATION PLECKSTRIN (N- |
| | | | | | | | | | | TERMINAL PLECKSTRIN HOMOLOGY |
| | | | | | | | | | | DOMAIN) MUTANT 1PLS 3 WITH LEU GLU |
| | | | | | | | | | | (HIS)6 ADDED TO THE C TERMINUS 1PLS |
| | | | | | | | | | | 4 (INS(G105-LEHHHHHH)) (NMR, 25 |
| | | | | | | | | | | STRUCTURES) 1PLS 5” |
| 267 | 1pms | | 242 | 337 | 6.50E−08 | −0.11 | 0.41 | | SOS 1; CHAIN: NULL; | “SIGNAL TRANSDUCTION SON OF |
| | | | | | | | | | | SEVENLESS; PLECKSTRIN, SON OF |
| | | | | | | | | | | SEVENLESS, SIGNAL TRANSDUCTION” |
| 270 | 1apm | E | 1049 | 1351 | 3.40E−100 | | | 100 | | “TRANSFERASE(PHOSPHOTRANSFERASE) |
| | | | | | | | | | | $C-/AMP$-DEPENDENT PROTEIN |
| | | | | | | | | | | KINASE (E.C.2.7.1.37) ($C/APK$) 1APM 3 |
| | | | | | | | | | | (CATALYTIC SUBUNIT) ““ALPHA”” |
| | | | | | | | | | | ISOENZYME MUTANT WITH SER 139 |
| | | | | | | | | | | 1APM 4 REPLACED BY ALA (/S139A$) |
| | | | | | | | | | | COMPLEX WITH THE PEPTIDE 1APM 5 |
| | | | | | | | | | | INHIBITOR PKI(5-24) AND THE |
| | | | | | | | | | | DETERGENT MEGA-8 1APM 6” |
| 270 | 1aql | | 1080 | 1350 | 1.00E−56 | | | 100.26 | CYCLIN-DEPENDENT | “PROTEIN KINASE CDK2; PROTEIN |
| | | | | | | | | | PROTEIN KINASE 2; CHAIN: | KINASE, CELL CYCLE, |
| | | | | | | | | | NULL; | PHOSPHORYLATION, STAUROSPORINE, 2 |
| | | | | | | | | | | CELL DIVISION, MITOSIS, INHIBITION” |
| 270 | 1blx | A | 1074 | 1350 | 3.40E−49 | | | 119.61 | CYCLIN-DEPENDENT | “COMPLEX (INHIBITOR |
| | | | | | | | | | KINASE 6; CHAIN: A; | PROTEIN/KINASE) INHIBITOR PROTEIN, |
| | | | | | | | | | P19INK4D; CHAIN: B; | CYCLIN-DEPENDENT KINASE, CELL |
| | | | | | | | | | | CYCLE 2 CONTROL, ALPHA/BETA, |
| | | | | | | | | | | COMPLEX (INHIBITOR |
| | | | | | | | | | | PROTEIN/KINASE)” |
| 270 | 1cmk | E | 1040 | 1351 | 0 | | | 102.82 | | PHOSPHOTRANSFERASE CAMP- |
| | | | | | | | | | | DEPENDENT PROTEIN KINASE |
| | | | | | | | | | | CATALYTIC SUBUNIT 1CMK 3 |
| | | | | | | | | | | (E.C.2.7.1.37) 1CMK 4 |
| 270 | 1ctp | E | 1046 | 1351 | 0 | | | 105.55 | | TRANSFERASE(PHOSPHOTRANSFERASE) |
| | | | | | | | | | | CAMP-DEPENDENT PROTEIN KINASE |
| | | | | | | | | | | (E.C.2.7.1.37) (CAPK) 1CTP 3 (CATALYTIC |
| | | | | | | | | | | SUBUNIT) 1CTP 4 |
| 270 | 1fgk | B | 1062 | 1350 | 8.50E−39 | | | 117.87 | “FGF RECEPTOR 1; CHAIN: | “PHOSPHOTRANSFERASE FGFR1K, |
| | | | | | | | | | A, B;” | FIBROBLAST GROWTH FACTOR |
| | | | | | | | | | | RECEPTOR 1; TRANSFERASE, TYROSINE- |
| | | | | | | | | | | PROTEIN KINASE, ATP-BINDING, 2 |
| | | | | | | | | | | PHOSPHORYLATION, RECEPTOR, |
| | | | | | | | | | | PHOSPHOTRANSFERASE” |
| 270 | 1fgk | A | 1075 | 1350 | 6.80E−33 | | | 115.09 | “FGF RECEPTOR 1; CHAIN: | “PHOSPHOTRANSFERASE FGFR1K, |
| | | | | | | | | | A, B;” | FIBROBLAST GROWTH FACTOR |
| | | | | | | | | | | RECEPTOR 1; TRANSFERASE, TYROSINE- |
| | | | | | | | | | | PROTEIN KINASE, ATP-BINDING, 2 |
| | | | | | | | | | | PHOSPHORYLATION, RECEPTOR, |
| | | | | | | | | | | PHOSPHOTRANSFERASE” |
| 270 | 1hcl | | 1080 | 1350 | 1.00E−58 | | | 122.13 | HUMAN CYCLIN- | “PROTEIN KINASE CDK2; TRANSFERASE, |
| | | | | | | | | | DEPENDENT KINASE 2; | SERINE/THREONINE PROTEIN KINASE, |
| | | | | | | | | | CHAIN: NULL; | ATP-BINDING, 2 CELL CYCLE, CELL |
| | | | | | | | | | | DIVISION, MITOSIS, PHOSPHORYLATION” |
| 270 | 1ir3 | A | 1068 | 1351 | 6.80E−30 | | | 99.63 | INSULIN RECEPTOR; | “COMPLEX (TRANSFERASE/SUBSTRATE) |
| | | | | | | | | | CHAIN: A; PEPTIDE | TYROSINE KINASE, SIGNAL |
| | | | | | | | | | SUBSTRATE; CHAIN: B; | TRANSDUCTION, |
| | | | | | | | | | | PHOSPHOTRANSFERASE, 2 COMPLEX |
| | | | | | | | | | | (KINASE/PEPTIDE SUBSTRATE/ATP |
| | | | | | | | | | | ANALOG), ENZYME, 3 COMPLEX |
| | | | | | | | | | | (TRANSFERASE/SUBSTRATE)” |
| 270 | 1phk | | 1076 | 1351 | 3.40E−86 | | | 114.42 | PHOSPHORYLASE KINASE; | “KINASE RABBIT MUSCLE |
| | | | | | | | | | CHAIN: NULL; | PHOSPHORYLASE KINASE; GLYCOGEN |
| | | | | | | | | | | METABOLISM, TRANSFERASE, |
| | | | | | | | | | | SERINE/THREONINE-PROTEIN, 2 KINASE, |
| | | | | | | | | | | ATP-BINDING, CALMODULIN-BINDING” |
| 271 | 1aql | | 251 | 447 | 6.80E−24 | −0.18 | 0.23 | | CYCLIN-DEPENDENT | “PROTEIN KINASE CDK2; PROTEIN |
| | | | | | | | | | PROTEIN KINASE 2; CHAIN: | KINASE, CELL CYCLE, |
| | | | | | | | | | NULL; | PHOSPHORYLATION, STAUROSPORINE, 2 |
| | | | | | | | | | | CELL DIVISION, MITOSIS, INHIBITION” |
| 271 | 1b6c | B | 191 | 548 | 1.20E−55 | 0.38 | 0.45 | | “FK506-BINDING PROTEIN; | “COMPLEX (ISOMERASE/PROTEIN |
| | | | | | | | | | CHAIN: A, C, E, G; TGF-B | KINASE) FKBP12; SERINE/THREONINE- |
| | | | | | | | | | SUPERFAMILY RECEPTOR | PROTEIN KINASE RECEPTOR R4; |
| | | | | | | | | | TYPE I; CHAIN: B, D, F, H;” | COMPLEX (ISOMERASE/PROTEIN |
| | | | | | | | | | | KINASE), RECEPTOR 2 |
| | | | | | | | | | | SERINE/THREONINE KINASE” |
| 271 | 1b6c | B | 259 | 443 | 3.40E−27 | −0.08 | 0.13 | | “FK506-BINDING PROTEIN; | “COMPLEX (ISOMERASE/PROTEIN |
| | | | | | | | | | CHAIN: A, C, E, G; TGF-B | KINASE) FKBP12; SERINE/THREONINE- |
| | | | | | | | | | SUPERFAMILY RECEPTOR | PROTEIN KINASE RECEPTOR R4; |
| | | | | | | | | | TYPE I; CHAIN: B, D, F, H;” | COMPLEX (ISOMERASE/PROTEIN |
| | | | | | | | | | | KINASE), RECEPTOR 2 |
| | | | | | | | | | | SERINE/THREONINE KINASE” |
| 271 | 1byg | A | 259 | 449 | 3.40E−31 | 0.02 | 0.52 | | C-TERMINAL SRC KINASE; | “TRANSFERASE CSK; PROTEIN KINASE, |
| | | | | | | | | | CHAIN: A; | C-TERMINAL SRC KINASE, |
| | | | | | | | | | | PHOSPHORYLATION, 2 STAUROSPORINE, |
| | | | | | | | | | | TRANSFERASE” |
| 271 | 1byg | A | 194 | 233 | 5.20E−06 | 0.06 | 0.15 | | C-TERMINAL SRC KINASE; | “TRANSFERASE CSK; PROTEIN KINASE, |
| | | | | | | | | | CHAIN: A; | C-TERMINAL SRC KINASE, |
| | | | | | | | | | | PHOSPHORYLATION, 2 STAUROSPORINE, |
| | | | | | | | | | | TRANSFERASE” |
| 271 | 1f3m | C | 258 | 449 | 5.10E−28 | 0.16 | 0.18 | | “SERINE/THREONINE- | “TRANSFERASE KINASE DOMAIN, |
| | | | | | | | | | PROTEIN KINASE PAK- | AUTOINHIBITORY FRAGMENT, |
| | | | | | | | | | ALPHA; CHAIN: A, B; | HOMODIMER” |
| | | | | | | | | | SERINE/THREONINE- | |
| | | | | | | | | | PROTEIN KINASE PAK- | |
| | | | | | | | | | ALPHA; CHAIN: C, D;” | |
| 271 | 1fgk | B | 259 | 445 | 5.10E−32 | 0.13 | 0.34 | | “FGF RECEPTOR 1; CHAIN: | “PHOSPHOTRANSFERASE FGFR1K, |
| | | | | | | | | | A, B;” | FIBROBLAST GROWTH FACTOR |
| | | | | | | | | | | RECEPTOR 1; TRANSFERASE, TYROSINE- |
| | | | | | | | | | | PROTEIN KINASE, ATP-BTNDING, 2 |
| | | | | | | | | | | PHOSPHORYLATION, RECEPTOR, |
| | | | | | | | | | | PHOSPHOTRANSFERASE” |
| 271 | 1fgk | A | 275 | 445 | 1.70E−30 | 0.33 | 0.55 | | “FGF RECEPTOR 1; CHAIN: | “PHOSPHOTRANSFERASE FGFR1K, |
| | | | | | | | | | A, B;” | FIBROBLAST GROWTH FACTOR |
| | | | | | | | | | | RECEPTOR 1; TRANSFERASE, TYROSINE- |
| | | | | | | | | | | PROTEIN KINASE, ATP-BINDING, 2 |
| | | | | | | | | | | PHOSPHORYLATION, RECEPTOR, |
| | | | | | | | | | | PHOSPHOTRANSFERASE” |
| 271 | 1fgk | B | 191 | 547 | 3.90E−29 | −0.2 | 0.68 | | “FGF RECEPTOR 1; CHAIN: | “PHOSPHOTRANSFERASE FGFR1K, |
| | | | | | | | | | A, B;” | FIBROBLAST GROWTH FACTOR |
| | | | | | | | | | | RECEPTOR 1; TRANSFERASE, TYROSINE- |
| | | | | | | | | | | PROTEIN KINASE, ATP-BINDING, 2 |
| | | | | | | | | | | PHOSPHORYLATION, RECEPTOR, |
| | | | | | | | | | | PHOSPHOTRANSFERASE” |
| 271 | 1fmk | | 258 | 449 | 5.10E−34 | 0.23 | 0.24 | | TYROSINE-PROTEIN | “PHOSPHOTRANSFERASE C-SRC, P60- |
| | | | | | | | | | KINASE SRC; CHAIN: NULL; | SRC; SRC, TYROSINE KINASE, |
| | | | | | | | | | | PHOSPHORYLATION, SH2, SH3, 2 |
| | | | | | | | | | | PHOSPHOTYROSINE, PROTO-ONCOGENE, |
| | | | | | | | | | | PHOSPHOTRANSFERASE” |
| 271 | 1fmk | | 193 | 547 | 1.30E−30 | 0.03 | 0.18 | | TYROSINE-PROTEIN | “PHOSPHOTRANSFERASE C-SRC, P60- |
| | | | | | | | | | KINASE SRC; CHAIN: NULL; | SRC; SRC, TYROSINE KINASE, |
| | | | | | | | | | | PHOSPHORYLATION, SH2, SH3, 2 |
| | | | | | | | | | | PHOSPHOTYROSINE, PROTO-ONCOGENE, |
| | | | | | | | | | | PHOSPHOTRANSFERASE” |
| 271 | 1fpu | A | 256 | 445 | 6.80E−33 | −0.09 | 0.54 | | “PROTO-ONCOGENE | “TRANSFERASE P150, C-ABL; KINASE, |
| | | | | | | | | | TYROSINE-PROTEIN | KINASE INHIBITOR, STI-571, ACTIVATION |
| | | | | | | | | | KINASE ABL; CHAIN: A, B;” | LOOP” |
| 271 | 1hcl | | 251 | 447 | 1.70E−27 | 0.38 | 0.49 | | HUMAN CYCLIN- | “PROTEIN KINASE CDK2; TRANSFERASE, |
| | | | | | | | | | DEPENDENT KINASE 2; | SERINE/THREONINE PROTEIN KINASE, |
| | | | | | | | | | CHAIN: NULL; | ATP-BINDING, 2 CELL CYCLE, CELL |
| | | | | | | | | | | DIVISION, MITOSIS, PHOSPHORYLATION” |
| 271 | 1ir3 | A | 259 | 445 | 3.40E−30 | 0.03 | 0.22 | | INSULIN RECEPTOR; | “COMPLEX (TRANSFERASE/SUBSTRATE) |
| | | | | | | | | | CHAIN: A; PEPTIDE | TYROSINE KINASE, SIGNAL |
| | | | | | | | | | SUBSTRATE; CHAIN: B; | TRANSDUCTION, |
| | | | | | | | | | | PHOSPHOTRANSFERASE, 2 COMPLEX |
| | | | | | | | | | | (KINASE/PEPTIDE SUBSTRATE/ATP |
| | | | | | | | | | | ANALOG), ENZYME, 3 COMPLEX |
| | | | | | | | | | | (TRANSFERASE/SUBSTRATE)” |
| 271 | 1ir3 | A | 290 | 547 | 2.60E−28 | 0.44 | 0.24 | | INSULIN RECEPTOR; | “COMPLEX (TRANSFERASE/SUBSTRATE) |
| | | | | | | | | | CHAIN: A; PEPTIDE | TYROSINE KINASE, SIGNAL |
| | | | | | | | | | SUBSTRATE; CHAIN: B; | TRANSDUCTION, |
| | | | | | | | | | | PHOSPHOTRANSFERASE, 2 COMPLEX |
| | | | | | | | | | | (KINASE/PEPTIDE SUBSTRATE/ATP |
| | | | | | | | | | | ANALOG), ENZYME, 3 COMPLEX |
| | | | | | | | | | | (TRANSFERASE/SUBSTRATE)” |
| 271 | 1ir3 | A | 193 | 233 | 0.0026 | −0.32 | 0.07 | | INSULIN RECEPTOR; | “COMPLEX (TRANSFERASE/SUBSTRATE) |
| | | | | | | | | | CHAIN: A; PEPTIDE | TYROSINE KINASE, SIGNAL |
| | | | | | | | | | SUBSTRATE; CHAIN: B; | TRANSDUCTION, |
| | | | | | | | | | | PHOSPHOTRANSFERASE, 2 COMPLEX |
| | | | | | | | | | | (KINASE/PEPTIDE SUBSTRATE/ATP |
| | | | | | | | | | | ANALOG), ENZYME, 3 COMPLEX |
| | | | | | | | | | | (TRANSFERASE/SUBSTRATE)” |
| 271 | 1phk | | 251 | 449 | 5.10E−24 | 0.16 | 0.47 | | PHOSPHORYLASE KINASE; | “KINASE RABBIT MUSCLE |
| | | | | | | | | | CHAIN: NULL; | PHOSPHORYLASE KINASE; GLYCOGEN |
| | | | | | | | | | | METABOLISM, TRANSFERASE, |
| | | | | | | | | | | SERINE/THREONINE-PROTEIN, 2 KINASE, |
| | | | | | | | | | | ATP-BINDING, CALMODULIN-BINDING” |
| 271 | 1qcf | A | 256 | 449 | 1.70E−31 | 0.21 | 0.83 | | HAEMATOPOETIC CELL | “TYROSINE KINASE TYROSINE KINASE- |
| | | | | | | | | | KINASE (HCK); CHAIN: A; | INHIBITOR COMPLEX, DOWN- |
| | | | | | | | | | | REGULATED KINASE, 2 ORDERED |
| | | | | | | | | | | ACTIVATION LOOP” |
| 271 | 1qcf | A | 290 | 547 | 1.20E−28 | 0.53 | 0.88 | | HAEMATOPOETIC CELL | “TYROSINE KINASE TYROSINE KINASE- |
| | | | | | | | | | KINASE (HCK); CHAIN: A; | INHIBITOR COMPLEX, DOWN- |
| | | | | | | | | | | REGULATED KINASE, 2 ORDERED |
| | | | | | | | | | | ACTIVATION LOOP” |
| 271 | 1qcf | A | 194 | 233 | 0.00039 | 0.16 | 0.42 | | HAEMATOPOETIC CELL | “TYROSINE KINASE TYROSINE KINASE- |
| | | | | | | | | | KINASE (HCK); CHAIN: A; | INHIBITOR COMPLEX, DOWN- |
| | | | | | | | | | | REGULATED KINASE, 2 ORDERED |
| | | | | | | | | | | ACTIVATION LOOP” |
| 271 | 1qpc | A | 259 | 449 | 3.40E−35 | 0.33 | 0.29 | | LCK KINASE; CHAIN: A; | TRANSFERASE ALPHA BETA FOLD |
| 271 | 1qpc | A | 290 | 547 | 5.20E−30 | 0.5 | 0.74 | | LCK KINASE; CHAIN: A; | TRANSFERASE ALPHA BETA FOLD |
| 271 | 1qpc | A | 187 | 233 | 0.00039 | −0.53 | 0.16 | | LCK KINASE; CHAIN: A; | TRANSFERASE ALPHA BETA FOLD |
| 271 | 1vr2 | A | 259 | 445 | 5.10E−25 | 0.15 | −0.06 | | VASCULAR ENDOTHELIAL | TRANSFERASE KDR; TYROSINE KINASE |
| | | | | | | | | | GROWTH FACTOR | |
| | | | | | | | | | RECEPTOR CHAIN: A; | |
| 272 | 1got | B | 837 | 1188 | 1.70E−63 | | | 141.57 | GT-ALPHA/GI-ALPHA | “COMPLEX (GTP-BINDING/TRANSDUCER) |
| | | | | | | | | | CHIMERA; CHAIN: A; GT- | BETA1, TRANSDUCIN BETA SUBUNIT; |
| | | | | | | | | | BETA; CHAIN: B; GT- | GAMMA1, TRANSDUCIN GAMMA |
| | | | | | | | | | GAMMA; CHAIN: G; | SUBUNIT; COMPLEX (GTP- |
| | | | | | | | | | | BINDING/TRANSDUCER), G PROTEIN, |
| | | | | | | | | | | HETEROTRIMER 2 SIGNAL |
| | | | | | | | | | | TRANSDUCTION” |
| 273 | 1got | B | 502 | 861 | 1.70E−59 | | | 140.82 | GT-ALPHA/GI-ALPHA | “COMPLEX (GTP-BINDING/TRANSDUCER) |
| | | | | | | | | | CHIMERA; CHAIN: A; GT- | BETA1, TRANSDUCIN BETA SUBUNIT; |
| | | | | | | | | | BETA; CHAIN: B; GT- | GAMMA1, TRANSDUCIN GAMMA |
| | | | | | | | | | GAMMA; CHAIN: G; | SUBUNIT; COMPLEX (GTP- |
| | | | | | | | | | | BINDING/TRANSDUCER), G PROTEIN, |
| | | | | | | | | | | HETEROTRIMER 2 SIGNAL |
| | | | | | | | | | | TRANSDUCTION” |
| 277 | 1rgp | | 161 | 364 | 6.80E−36 | | | 86.57 | RHOGAP; CHAIN: NULL; | “G-PROTEIN CDC42 GTPASE-ACTIVATING |
| | | | | | | | | | | PROTEIN; G-PROTEIN, GAP, SIGNAL- |
| | | | | | | | | | | TRANSDUCTION” |
| 277 | 1tx4 | A | 166 | 378 | 1.00E−34 | | | 85.18 | P50-RHOGAP; CHAIN: A; | “COMPLEX(GTPASE ACTIVATN/PROTO- |
| | | | | | | | | | TRANSFORMING PROTEIN | ONCOGENE) GTPASE-ACTIVATING |
| | | | | | | | | | RHOA; CHAIN: B; | PROTEIN RHOGAP; COMPLEX (GTPASE |
| | | | | | | | | | | ACTIVATION/PROTO-ONCOGENE), |
| | | | | | | | | | | GTPASE, 2 TRANSITION STATE, GAP” |
| 278 | 1ctq | A | 4 | 177 | 6.30E−22 | 0.49 | 1 | | TRANSFORMING PROTEIN | “SIGNALING PROTEIN G PROTEIN, GTP |
| | | | | | | | | | P21/H-RAS-1; CHAIN: A; | HYDROLYSIS, KINETIC |
| | | | | | | | | | | CRYSTALLOGRAPHY, 2 SIGNALING |
| | | | | | | | | | | PROTEIN” |
| 278 | 1ctq | A | 2 | 180 | 6.30E−22 | | | 77.6 | TRANSFORMING PROTEIN | “SIGNALING PROTEIN G PROTEIN, GTP |
| | | | | | | | | | P21/H-RAS-1; CHAIN: A; | HYDROLYSIS, KINETIC |
| | | | | | | | | | | CRYSTALLOGRAPHY, 2 SIGNALING |
| | | | | | | | | | | PROTEIN” |
| 278 | 1cxz | A | 1 | 177 | 6.30E−22 | −0.1 | 0.75 | | HIS-TAGGED | “SIGNALING PROTEIN PROTEIN-PROTEIN |
| | | | | | | | | | TRANSFORMING PROTEIN | COMPLEX, ANTIPARALLEL COILED- |
| | | | | | | | | | RHOA(0-181); CHAIN: A; | COIL” |
| | | | | | | | | | PKN; CHAIN: B; | |
| 278 | 1ds6 | A | 2 | 177 | 2.10E−22 | 0.31 | 0.93 | | RAS-RELATED C3 | “SIGNALING PROTEIN P21-RAC2; RHO |
| | | | | | | | | | BOTULINUM TOXIN | GDI 2, RHO-GDI BETA, LY-GDI; BETA |
| | | | | | | | | | SUBSTRATE 2; CHAIN: A; | SANDWHICH, PROTEIN-PROTEIN |
| | | | | | | | | | RHO GDP-DISSOCIATION | COMPLEX, G-DOMAIN, 2 |
| | | | | | | | | | INHIBITOR 2; CHAIN: B; | IMMUNOGLOBULIN FOLD, WALKER |
| | | | | | | | | | | FOLD, GTP-BINDING PROTEIN” |
| 278 | 1hur | A | 5 | 175 | 4.20E−17 | 0.16 | 0.03 | | “HUMAN ADP- | “PROTEIN TRANSPORT GDP-BINDING, |
| | | | | | | | | | RIBOSYLATION FACTOR 1; | MEMBRANE TRAFFICKIN, NON- |
| | | | | | | | | | 1HUR 5 CHAIN: A, B; 1HUR | MYRISTOYLATED 1HUR 16” |
| | | | | | | | | | 7” | |
| 278 | 1ibr | A | 5 | 177 | 1.10E−23 | 0.08 | 0.8 | | “RAN; CHAIN: A, C; | “SMALL GTPASE KARYOPHERIN BETA, |
| | | | | | | | | | IMPORTIN BETA SUBUNIT; | P95 SMALL GTPASE, NUCLEAR |
| | | | | | | | | | CHAIN: B, D;” | TRANSPORT RECEPTOR” |
| 278 | 1ibr | A | 3 | 184 | 1.10E−23 | | | 56.34 | “RAN; CHAIN: A, C; | “SMALL GTPASE KARYOPHERIN BETA, |
| | | | | | | | | | IMPORTIN BETA SUBUNIT; | P95 SMALL GTPASE, NUCLEAR |
| | | | | | | | | | CHAIN: B, D;” | TRANSPORT RECEPTOR” |
| 278 | 1kao | | 19 | 177 | 1.90E−18 | 0.45 | 1 | | RAP2A; CHAIN: NULL; | “GTP-BINDING PROTEIN GTP-BINDING |
| | | | | | | | | | | PROTEIN, SMALL G PROTEIN, RAP2, GDP, |
| | | | | | | | | | | RAS” |
| 278 | 1kao | | 2 | 180 | 1.90E−18 | | | 89.76 | RAP2A; CHAIN: NULL; | “GTP-BINDING PROTEIN GTP-BINDING |
| | | | | | | | | | | PROTEIN, SMALL G PROTEIN, RAP2, GDP, |
| | | | | | | | | | | RAS” |
| 278 | 1rrp | C | 5 | 177 | 1.50E−23 | 0.37 | 0.9 | | “RAN; CHAIN: A, C; | “COMPLEX (SMALL GTPASE/NUCLEAR |
| | | | | | | | | | NUCLEAR PORE COMPLEX | PROTEIN) COMPLEX (SMALL |
| | | | | | | | | | PROTEIN NUP358; CHAIN: B, | GTPASE/NUCLEAR PROTEIN), SMALL |
| | | | | | | | | | D;” | GTPASE, 2 NUCLEAR TRANSPORT” |
| 278 | 1rrp | C | 2 | 195 | 1.50E−23 | | | 57.02 | “RAN; CHAIN: A, C; | “COMPLEX (SMALL GTPASE/NUCLEAR |
| | | | | | | | | | NUCLEAR PORE COMPLEX | PROTEIN) COMPLEX (SMALL |
| | | | | | | | | | PROTEIN NUP358; CHAIN: B, | GTPASE/NUCLEAR PROTEIN), SMALL |
| | | | | | | | | | D;” | GTPASE, 2 NUCLEAR TRANSPORT” |
| 278 | 1zbd | A | 5 | 177 | 4.20E−26 | 0.49 | 1 | | RAB-3A; CHAIN: A; | “COMPLEX (GTP-BINDING/EFFECTOR) |
| | | | | | | | | | RABPHILIN-3A; CHAIN: B; | RAS-RELATED PROTEIN RAB3A; |
| | | | | | | | | | | COMPLEX (GTP-BINDING/EFFECTOR), G |
| | | | | | | | | | | PROTEIN, EFFECTOR, RABCDR, 2 |
| | | | | | | | | | | SYNAPTIC EXOCYTOSIS, RAB PROTEIN, |
| | | | | | | | | | | RAB3A, RABPHILIN” |
| 278 | 1zbd | A | 1 | 186 | 4.20E−26 | | | 57 | RAB-3A; CHAIN: A; | “COMPLEX (GTP-BINDING/EFFECTOR) |
| | | | | | | | | | RABPHILIN-3A; CHAIN: B; | RAS-RELATED PROTEIN RAB3A; |
| | | | | | | | | | | COMPLEX (GTP-BINDING/EFFECTOR), G |
| | | | | | | | | | | PROTEIN, EFFECTOR, RABCDR, 2 |
| | | | | | | | | | | SYNAPTIC EXOCYTOSIS, RAB PROTEIN, |
| | | | | | | | | | | RAB3A, RABPHILIN” |
| 278 | 2ngr | A | 4 | 203 | 6.30E−22 | 0.02 | 0.53 | | GTP BINDING PROTEIN | “HYDROLASE CDC42/CDC42GAP; |
| | | | | | | | | | (G25K); CHAIN: A; GTPASE | CDC42/CDC42GAP; TRANSITION STATE, |
| | | | | | | | | | ACTIVATING PROTEIN | G-PROTEIN, GAP, CDC42, ALF3., |
| | | | | | | | | | (RHG); CHAIN: B; | HYDROLASE” |
| 278 | 2ngr | A | 2 | 191 | 6.30E−22 | | | 55.9 | GTP BINDING PROTEIN | “HYDROLASE CDC42/CDC42GAP; |
| | | | | | | | | | (G25K); CHAIN: A; GTPASE | CDC42/CDC42GAP; TRANSITION STATE, |
| | | | | | | | | | ACTIVATING PROTEIN | G-PROTEIN, GAP, CDC42, ALF3., |
| | | | | | | | | | (RHG); CHAIN: B; | HYDROLASE” |
| 278 | 3rab | A | 5 | 177 | 4.20E−26 | 0.44 | 1 | | RAB3A; CHAIN: A; | “HYDROLASE G PROTEIN, VESICULAR |
| | | | | | | | | | | TRAFFICKING, GTP HYDROLYSIS, RAB 2 |
| | | | | | | | | | | PROTEIN, NEUROTRANSMITTER |
| | | | | | | | | | | RELEASE, HYDROLASE” |
| 278 | 3rab | A | 1 | 181 | 4.20E−26 | | | 64.51 | RAB3A; CHAIN: A; | “HYDROLASE G PROTEIN, VESICULAR |
| | | | | | | | | | | TRAFFICKING, GTP HYDROLYSIS, RAB 2 |
| | | | | | | | | | | PROTEIN, NEUROTRANSMITTER |
| | | | | | | | | | | RELEASE, HYDROLASE” |
| 284 | 1qqe | A | 201 | 485 | 1.20E−10 | | | 81.84 | VESICULAR TRANSPORT | “PROTEIN TRANSPORT HELIX-TURN- |
| | | | | | | | | | PROTEIN SEC17; CHAIN: A; | HELIX TPR-LIKE REPEAT, PROTEIN |
| | | | | | | | | | | TRANSPORT” |
| 292 | 1cly | A | 11 | 142 | 3.20E−44 | | | 59.45 | RAS-RELATED PROTEIN | “SIGNALING PROTEIN GTP-BINDING |
| | | | | | | | | | RAP-1A; CHAIN: A; PROTOONKOGENE | PROTEINS, PROTEIN-PROTEIN COMPLEX, |
| | | | | | | | | | SERINE/THREONINE | EFFECTORS” |
| | | | | | | | | | PROTEIN KINASE CHAIN: B; | |
| 292 | 1ctq | A | 11 | 143 | 4.80E−47 | | | 73.8 | TRANSFORMING PROTEIN | “SIGNALING PROTEIN G PROTEIN, GTP |
| | | | | | | | | | P21/H-RAS-1; CHAIN: A; | HYDROLYSIS, KINETIC |
| | | | | | | | | | | CRYSTALLOGRAPHY, 2 SIGNALING |
| | | | | | | | | | | PROTEIN” |
| 292 | 1ibr | A | 11 | 148 | 3.20E−30 | | | 51.93 | “RAN; CHAIN: A, C; | “SMALL GTPASE KARYOPHERIN BETA, |
| | | | | | | | | | IMPORTIN BETA SUBUNIT; | P95 SMALL GTPASE, NUCLEAR |
| | | | | | | | | | CHAIN: B, D;” | TRANSPORT RECEPTOR” |
| 292 | 1kao | | 11 | 143 | 8.00E−42 | | | 59.64 | RAP2A; CHAIN: NULL; | “GTP-BINDING PROTEIN GTP-BINDING |
| | | | | | | | | | | PROTEIN, SMALL G PROTEIN, RAP2, GDP, |
| | | | | | | | | | | RAS” |
| 292 | 1plj | | 11 | 142 | 9.60E−44 | | | 60.42 | | “ONCOGENE PROTEIN C-H-RAS P21 |
| | | | | | | | | | | PROTEIN MUTANT WITH GLY 12 |
| | | | | | | | | | | REPLACED BY PRO 1PLJ3 (G12P) |
| | | | | | | | | | | COMPLEXED WITH P3-1-(2- |
| | | | | | | | | | | NITROPHENYL)ETHYL- 1PLJ4 |
| | | | | | | | | | | GUANOSINE-5′-(B,G-IMIDO)- |
| | | | | | | | | | | TRIPHOSPHATE 1PLJ5” |
| 292 | 1rrp | C | 9 | 158 | 1.30E−30 | | | 51.49 | “RAN; CHAIN: A, C; | “COMPLEX (SMALL GTPASE/NUCLEAR |
| | | | | | | | | | NUCLEAR PORE COMPLEX | PROTEIN) COMPLEX (SMALL |
| | | | | | | | | | PROTEIN NUP358; CHAIN: B, | GTPASE/NUCLEAR PROTEIN), SMALL |
| | | | | | | | | | D;” | GTPASE, 2 NUCLEAR TRANSPORT” |
| 292 | 1zbd | A | 6 | 148 | 4.80E−45 | | | 101.23 | RAB-3A; CHAIN: A; | “COMPLEX (GTP-BINDING/EFFECTOR) |
| | | | | | | | | | RABPHILIN-3A; CHAIN: B; | RAS-RELATED PROTEIN RAB3A; |
| | | | | | | | | | | COMPLEX (GTP-BINDING/EFFECTOR), G |
| | | | | | | | | | | PROTEIN, EFFECTOR, RABCDR, 2 |
| | | | | | | | | | | SYNAPTIC EXOCYTOSIS, RAB PROTEIN, |
| | | | | | | | | | | RAB3A, RABPHILIN” |
| 292 | 3rab | A | 7 | 143 | 3.20E−44 | | | 107.28 | RAB3A; CHAIN: A; | “HYDROLASE G PROTEIN, VESICULAR |
| | | | | | | | | | | TRAFFICKING, GTP HYDROLYSIS, RAB 2 |
| | | | | | | | | | | PROTEIN, NEUROTRANSMITTER |
| | | | | | | | | | | RELEASE, HYDROLASE” |
| 293 | 1a06 | | 274 | 582 | 8.00E−97 | | | 164.46 | CALCIUM/CALMODULIN- | “KINASE KINASE, SIGNAL |
| | | | | | | | | | DEPENDENT PROTEIN | TRANSDUCTION, |
| | | | | | | | | | KINASE; CHAIN: NULL; | CALCIUM/CALMODULIN” |
| 293 | 1apm | E | 248 | 588 | 0 | | | 122.98 | | “TRANSFERASE(PHOSPHOTRANSFERASE) |
| | | | | | | | | | | $C-/AMP$-DEPENDENT PROTEIN |
| | | | | | | | | | | KINASE (E.C.2.7.1.37) ($C/APK$) 1APM 3 |
| | | | | | | | | | | (CATALYTIC SUBUNIT) ““ALPHA”” |
| | | | | | | | | | | ISOENZYME MUTANT WITH SER 139 |
| | | | | | | | | | | 1APM 4 REPLACED BY ALA (/S139A$) |
| | | | | | | | | | | COMPLEX WITH THE PEPTIDE 1APM 5 |
| | | | | | | | | | | INHIBITOR PKI(5-24) AND THE |
| | | | | | | | | | | DETERGENT MEGA-8 1APM 6” |
| 293 | 1cmk | E | 231 | 588 | 0 | | | 122.96 | | PHOSPHOTRANSFERASE CAMP- |
| | | | | | | | | | | DEPENDENT PROTEIN KINASE |
| | | | | | | | | | | CATALYTIC SUBUNIT 1CMK 3 |
| | | | | | | | | | | (E.C.2.7.1.37) 1CMK 4 |
| 293 | 1ctp | E | 235 | 585 | 0 | | | 125.4 | | TRANSFERASE(PHOSPHOTRANSFERASE) |
| | | | | | | | | | | CAMP-DEPENDENT PROTEIN KINASE |
| | | | | | | | | | | (E.C.2.7.1.37) (CAPK) 1CTP 3 (CATALYTIC |
| | | | | | | | | | | SUBUNIT) 1CTP4 |
| 293 | 1koa | | 249 | 596 | 4.20E−95 | | | 178.83 | TWITCHIN; CHAIN: NULL; | “KINASE KINASE, TWITCHIN, |
| | | | | | | | | | | INTRASTERIC REGULATION” |
| 293 | 1kob | A | 251 | 590 | 8.00E−94 | | | 252.1 | “TWITCHIN; CHAIN: A, B;” | “KINASE KINASE, TWITCHIN, |
| | | | | | | | | | | INTRASTERIC REGULATION” |
| 293 | 1tki | A | 277 | 596 | 5.60E−95 | | | 226.87 | “TITIN; CHAIN: A, B;” | “SERINE KINASE SERINE KINASE, TITIN, |
| | | | | | | | | | | MUSCLE, AUTOINHIBITION” |
| 294 | 1byl | A | 92 | 315 | 2.80E−45 | | | 85.97 | PIX; CHAIN: A; | “TRANSPORT PROTEIN RHO-GTPASE |
| | | | | | | | | | | EXCHANGE FACTOR, TRANSPORT |
| | | | | | | | | | | PROTEIN” |
| 297 | 1got | B | 227 | 546 | 6.40E−69 | | | 117.61 | GT-ALPHA/GI-ALPHA | “COMPLEX (GTP-BINDING/TRANSDUCER) |
| | | | | | | | | | CHIMERA; CHAIN: A; GT- | BETA1, TRANSDUCIN BETA SUBUNIT; |
| | | | | | | | | | BETA; CHAIN: B; GT- | GAMMA1, TRANSDUCIN GAMMA |
| | | | | | | | | | GAMMA; CHAIN: G; | SUBUNIT; COMPLEX (GTP- |
| | | | | | | | | | | BINDING/TRANSDUCER), G PROTEIN, |
| | | | | | | | | | | HETEROTRIMER 2 SIGNAL |
| | | | | | | | | | | TRANSDUCTION” |
| 298 | 1got | B | 180 | 514 | 1.60E−65 | | | 111.63 | GT-ALPHA/GI-ALPHA | “COMPLEX (GTP-BINDING/TRANSDUCER) |
| | | | | | | | | | CHIMERA; CHAIN: A; GT- | BETA1, TRANSDUCIN BETA SUBUNIT; |
| | | | | | | | | | BETA; CHAIN: B; GT- | GAMMA1, TRANSDUCIN GAMMA |
| | | | | | | | | | GAMMA; CHAIN: G; | SUBUNIT; COMPLEX (GTP- |
| | | | | | | | | | | BINDING/TRANSDUCER), G PROTEIN, |
| | | | | | | | | | | HETEROTRIMER 2 SIGNAL |
| | | | | | | | | | | TRANSDUCTION” |
| 302 | 1alh | A | 279 | 355 | 1.30E−26 | | | 51.07 | “QGSR ZINC FINGER | “COMPLEX (ZINC FINGER/DNA) |
| | | | | | | | | | PEPTIDE; CHAIN: A; | COMPLEX (ZINC FINGER/DNA), ZINC |
| | | | | | | | | | DUPLEX | FINGER, DNA-BINDING PROTEIN” |
| | | | | | | | | | OLIGONUCLEOTIDE | |
| | | | | | | | | | BINDING SITE; CHAIN: B, | |
| | | | | | | | | | C;” | |
| 302 | 1mey | C | 279 | 354 | 4.80E−46 | | | 58.97 | “DNA; CHAIN: A, B, D, E; | “COMPLEX (ZINC FINGER/DNA) ZINC |
| | | | | | | | | | CONSENSUS ZINC FINGER | FINGER, PROTEIN-DNA INTERACTION, |
| | | | | | | | | | PROTEIN; CHAIN: C, F, G;” | PROTEIN DESIGN, 2 CRYSTAL |
| | | | | | | | | | | STRUCTURE, COMPLEX (ZINC |
| | | | | | | | | | | FINGER/DNA)” |
| 303 | 1a17 | | 76 | 234 | 1.30E−26 | | | 95.13 | SERINE/THREONINE | “HYDROLASE TETRATRICOPEPTIDE, TRP; |
| | | | | | | | | | PROTEIN PHOSPHATASE 5; | HYDROLASE, PHOSPHATASE, PROTEIN- |
| | | | | | | | | | CHAIN: NULL; | PROTEIN INTERACTIONS, TPR, 2 SUPER- |
| | | | | | | | | | | HELIX, X-RAY STRUCTURE” |
| 303 | 1qqe | A | 1 | 290 | 6.40E−07 | | | 62.22 | VESICULAR TRANSPORT | “PROTEIN TRANSPORT HELIX-TURN- |
| | | | | | | | | | PROTEIN SEC17; CHAIN: A; | HELIX TPR-LIKE REPEAT, PROTEIN |
| | | | | | | | | | | TRANSPORT” |
| 305 | 1aut | L | 141 | 238 | 4.20E−25 | 0.27 | 0.11 | | “ACTIVATED PROTEIN C; | “COMPLEX (BLOOD |
| | | | | | | | | | CHAIN: C, L; D-PHE-PRO- | COAGULATION/INHIBITOR) |
| | | | | | | | | | MAI; CHAIN: P;” | AUTOPROTHROMBIN IIA; HYDROLASE, |
| | | | | | | | | | | SERINE PROTEINASE), PLASMA |
| | | | | | | | | | | CALCIUM BINDING, 2 GLYCOPROTEIN, |
| | | | | | | | | | | COMPLEX (BLOOD |
| | | | | | | | | | | COAGULATION/INHIBITOR)” |
| 305 | 1aut | L | 178 | 269 | 1.00E−11 | 0.21 | 0.19 | | “ACTIVATED PROTEIN C; | “COMPLEX (BLOOD |
| | | | | | | | | | CHAIN: C, L; D-PHE-PRO- | COAGULATION/INHIBITOR) |
| | | | | | | | | | MAI; CHAIN: P;” | AUTOPROTHROMBIN IIA; HYDROLASE, |
| | | | | | | | | | | SERINE PROTEINASE), PLASMA |
| | | | | | | | | | | CALCIUM BINDING, 2 GLYCOPROTEIN, |
| | | | | | | | | | | COMPLEX (BLOOD |
| | | | | | | | | | | COAGULATION/INHIBITOR)” |
| 305 | 1aut | L | 141 | 237 | 4.20E−25 | | | 59.69 | “ACTIVATED PROTEIN C; | “COMPLEX (BLOOD |
| | | | | | | | | | CHAIN: C, L; D-PHE-PRO- | COAGULATION/INHIBITOR) |
| | | | | | | | | | MAI; CHAIN: P;” | AUTOPROTHROMBIN IIA; HYDROLASE, |
| | | | | | | | | | | SERINE PROTEINASE), PLASMA |
| | | | | | | | | | | CALCIUM BINDING, 2 GLYCOPROTEIN, |
| | | | | | | | | | | COMPLEX (BLOOD |
| | | | | | | | | | | COAGULATION/INHIBITOR)” |
| 305 | 1dan | L | 129 | 230 | 2.10E−27 | 0.07 | 0.54 | | “BLOOD COAGULATION | “BLOOD COAGULATION, SERINE |
| | | | | | | | | | FACTOR VIIA; CHAIN: L, H; | PROTEASE, COMPLEX, CO-FACTOR, 2 |
| | | | | | | | | | SOLUBLE TISSUE FACTOR; | RECEPTOR ENZYME, INHIBITOR, GLA, |
| | | | | | | | | | CHAIN: T, U; D-PHE-PHE- | EGF, 3 COMPLEX (SERINE |
| | | | | | | | | | ARG- | PROTEASE/COFACTOR/LIGAND)” |
| | | | | | | | | | CHLOROMETHYLKETONE | |
| | | | | | | | | | (DFFRCMK) WITH CHAIN: | |
| | | | | | | | | | C;” | |
| 305 | 1dan | L | 182 | 266 | 1.40E−12 | 0.02 | −0.05 | | “BLOOD COAGULATION | “BLOOD COAGULATION, SERINE |
| | | | | | | | | | FACTOR VIIA; CHAIN: L, H; | PROTEASE, COMPLEX, CO-FACTOR, 2 |
| | | | | | | | | | SOLUBLE TISSUE FACTOR; | RECEPTOR ENZYME, INHIBITOR, GLA, |
| | | | | | | | | | CHAIN: T, U; D-PHE-PHE- | EGF, 3 COMPLEX (SERINE |
| | | | | | | | | | ARG- | PROTEASE/COFACTOR/LIGAND)” |
| | | | | | | | | | CHLOROMETHYLKETONE | |
| | | | | | | | | | (DFFRCMK) WITH CHAIN: | |
| | | | | | | | | | C;” | |
| 305 | 1dan | L | 119 | 232 | 2.10E−27 | | | 69.56 | “BLOOD COAGULATION | “BLOOD COAGULATION, SERINE |
| | | | | | | | | | FACTOR VIIA; CHAIN: L, H; | PROTEASE, COMPLEX, CO-FACTOR, 2 |
| | | | | | | | | | SOLUBLE TISSUE FACTOR; | RECEPTOR ENZYME, INHIBITOR, GLA, |
| | | | | | | | | | CHAIN: T, U; D-PHE-PHE- | EGF, 3 COMPLEX (SERINE |
| | | | | | | | | | ARG- | PROTEASE/COFACTOR/LIGAND)” |
| | | | | | | | | | CHLOROMETHYLKETONE | |
| | | | | | | | | | (DFFRCMK) WITH CHAIN: | |
| | | | | | | | | | C;” | |
| 305 | 1dva | L | 142 | 230 | 1.50E−23 | 0.44 | 0.83 | | “DES-GLA FACTOR VIIA | HYDROLASE/HYDROLASE INHIBITOR |
| | | | | | | | | | (HEAVY CHAIN); CHAIN: H, | PROTEIN-PEPTIDE COMPLEX |
| | | | | | | | | | I; DES-GLA FACTOR VIIA | |
| | | | | | | | | | (LIGHT CHAIN); CHAIN: L, | |
| | | | | | | | | | M; (DPN)-PHE-ARG; CHAIN: | |
| | | | | | | | | | C, D; PEPTIDE E-76; CHAIN: | |
| | | | | | | | | | X, Y;” | |
| 305 | 1dx5 | I | 146 | 256 | 4.20E−20 | 0.12 | −0.07 | | “THROMBIN LIGHT CHAIN; | “SERINE PROTEINASE COAGULATION |
| | | | | | | | | | CHAIN: A, B, C, D; | FACTOR II; COAGULATION FACTOR II; |
| | | | | | | | | | THROMBIN HEAVY CHAIN; | FETOMODULIN, TM, CD141 ANTIGEN; |
| | | | | | | | | | CHAIN: M, N, O, P; | EGR-CMK SERINE PROTEINASE, EGF- |
| | | | | | | | | | THROMBOMODULIN; | LIKE DOMAINS, ANTICOAGULANT |
| | | | | | | | | | CHAIN: I, J, K, L; THROMBIN | COMPLEX, 2 ANTIFIBRINOLYTIC |
| | | | | | | | | | INHIBITOR L-GLU-L-GLY-L- | COMPLEX” |
| | | | | | | | | | ARM; CHAIN: E, F, G, H;” | |
| 305 | 1dx5 | I | 143 | 257 | 1.50E−14 | 0.23 | 0.15 | | “THROMBIN LIGHT CHAIN; | “SERINE PROTEINASE COAGULATION |
| | | | | | | | | | CHAIN: A, B, C, D; | FACTOR II; COAGULATION FACTOR II; |
| | | | | | | | | | THROMBIN HEAVY CHAIN; | FETOMODULIN, TM, CD141 ANTIGEN; |
| | | | | | | | | | CHAIN: M, N, O, P; | EGR-CMK SERINE PROTEINASE, EGF- |
| | | | | | | | | | THROMBOMODULIN; | LIKE DOMAINS, ANTICOAGULANT |
| | | | | | | | | | CHAIN: I, J, K, L; THROMBIN | COMPLEX, 2 ANTIFIBRINOLYTIC |
| | | | | | | | | | INHIBITOR L-GLU-L-GLY-L- | COMPLEX” |
| | | | | | | | | | ARM; CHAIN: E, F, G, H;” | |
| 305 | 1dx5 | I | 181 | 275 | 1.70E−13 | 0.2 | −0.18 | | “THROMBIN LIGHT CHAIN; | “SERINE PROTEINASE COAGULATION |
| | | | | | | | | | CHAIN: A, B, C, D; | FACTOR II; COAGULATION FACTOR II; |
| | | | | | | | | | THROMBIN HEAVY CHAIN; | FETOMODULIN, TM, CD141 ANTIGEN; |
| | | | | | | | | | CHAIN: M, N, O, P; | EGR-CMK SERINE PROTEINASE, EGF- |
| | | | | | | | | | THROMBOMODULIN; | LIKE DOMAINS, ANTICOAGULANT |
| | | | | | | | | | CHAIN: I, J, K, L; THROMBIN | COMPLEX, 2 ANTIFIBRINOLYTIC |
| | | | | | | | | | INHIBITOR L-GLU-L-GLY-L- | COMPLEX” |
| | | | | | | | | | ARM; CHAIN: E, F, G, H;” | |
| 305 | 1emn | | 182 | 260 | 8.50E−17 | 0.26 | 0.69 | | FIBRILLIN; CHAIN: NULL; | “MATRIX PROTEIN EXTRACELLULAR |
| | | | | | | | | | | MATRIX, CALCIUM-BINDING, |
| | | | | | | | | | | GLYCOPROTEIN, 2 REPEAT, SIGNAL, |
| | | | | | | | | | | MULTIGENE FAMILY, DISEASE |
| | | | | | | | | | | MUTATION, 3 EGF-LIKE DOMAIN, |
| | | | | | | | | | | HUMAN FIBRILLIN-1 FRAGMENT, |
| | | | | | | | | | | MATRIX PROTEIN” |
| 305 | 1emn | | 141 | 219 | 3.40E−19 | | | 58.55 | FIBRILLIN; CHAIN: NULL; | “MATRIX PROTEIN EXTRACELLULAR |
| | | | | | | | | | | MATRIX, CALCIUM-BINDING, |
| | | | | | | | | | | GLYCOPROTEIN, 2 REPEAT, SIGNAL, |
| | | | | | | | | | | MULTIGENE FAMILY, DISEASE |
| | | | | | | | | | | MUTATION, 3 EGF-LIKE DOMAIN, |
| | | | | | | | | | | HUMAN FIBRILLIN-1 FRAGMENT, |
| | | | | | | | | | | MATRIX PROTEIN” |
| 305 | 1ext | A | 18 | 176 | 8.40E−12 | | | 52.2 | “TUMOR NECROSIS | “SIGNALLING PROTEIN BINDING |
| | | | | | | | | | FACTOR RECEPTOR; | PROTEIN, CYTOKINE, SIGNALLING |
| | | | | | | | | | CHAIN: A, B;” | PROTEIN” |
| 305 | 1fak | L | 142 | 232 | 8.40E−24 | 0.26 | 0.34 | | BLOOD COAGULATION | “BLOOD CLOTTING COMPLEX(SERINE |
| | | | | | | | | | FACTOR VIIA; CHAIN: L; | PROTEASE/COFACTOR/LIGAND), BLOOD |
| | | | | | | | | | BLOOD COAGULATION | COAGULATION, 2 SERINE PROTEASE, |
| | | | | | | | | | FACTOR VIIA; CHAIN: H; | COMPLEX, CO-FACTOR, RECEPTOR |
| | | | | | | | | | SOLUBLE TISSUE FACTOR; | ENZYME, 3 INHIBITOR, GLA, EGF, |
| | | | | | | | | | CHAIN: T; 5L15; CHAIN: I; | COMPLEX (SERINE 4 |
| | | | | | | | | | | PROTEASE/COFACTOR/LIGAND), BLOOD |
| | | | | | | | | | | CLOTTING” |
| 305 | 1fak | L | 182 | 266 | 1.40E−12 | 0 | −0.03 | | BLOOD COAGULATION | “BLOOD CLOTTING COMPLEX(SERINE |
| | | | | | | | | | FACTOR VIIA; CHAIN: L; | PROTEASE/COFACTOR/LIGAND), BLOOD |
| | | | | | | | | | BLOOD COAGULATION | COAGULATION, 2 SERINE PROTEASE, |
| | | | | | | | | | FACTOR VIIA; CHAIN: H; | COMPLEX, CO-FACTOR, RECEPTOR |
| | | | | | | | | | SOLUBLE TISSUE FACTOR; | ENZYME, 3 INHIBITOR, GLA, EGF, |
| | | | | | | | | | CHAIN: T; 5L15; CHAIN: I; | COMPLEX (SERINE 4 |
| | | | | | | | | | | PROTEASE/COFACTOR/LIGAND), BLOOD |
| | | | | | | | | | | CLOTTING” |
| 305 | 1klo | | 73 | 238 | 4.20E−29 | 0.14 | 0.39 | | LAMININ; CHAIN: NULL; | GLYCOPROTEIN GLYCOPROTEIN |
| 305 | 1klo | | 114 | 250 | 2.10E−26 | 0.09 | −0.03 | | LAMININ; CHAIN: NULL; | GLYCOPROTEIN GLYCOPROTEIN |
| 305 | 1klo | | 34 | 198 | 1.10E−25 | 0.02 | 0.01 | | LAMININ; CHAIN: NULL; | GLYCOPROTEIN GLYCOPROTEIN |
| 305 | 1klo | | 71 | 238 | 4.20E−29 | | | 79.78 | LAMININ; CHAIN: NULL; | GLYCOPROTEIN GLYCOPROTEIN |
| 305 | 1pfx | L | 182 | 266 | 1.70E−12 | 0.34 | 0.42 | | “FACTOR IXA; CHAIN: C, L,; | “COMPLEX (BLOOD |
| | | | | | | | | | D-PHE-PRO-ARG; CHAIN: I;” | COAGULATION/INHIBITOR) CHRISTMAS |
| | | | | | | | | | | FACTOR; COMPLEX, INHIBITOR, |
| | | | | | | | | | | HEMOPHILIA/EGF, BLOOD |
| | | | | | | | | | | COAGULATION, 2 PLASMA, SERINE |
| | | | | | | | | | | PROTEASE, CALCIUM-BINDING, |
| | | | | | | | | | | HYDROLASE, 3 GLYCOPROTEIN” |
| 305 | 1pfx | L | 116 | 243 | 3.40E−14 | | | 78.6 | “FACTOR IXA; CHAIN: C, L,; | “COMPLEX (BLOOD |
| | | | | | | | | | D-PHE-PRO-ARG; CHAIN: I;” | COAGULATION/INHIBITOR) CHRISTMAS |
| | | | | | | | | | | FACTOR; COMPLEX, INHIBITOR, |
| | | | | | | | | | | HEMOPHILIA/EGF, BLOOD |
| | | | | | | | | | | COAGULATION, 2 PLASMA, SERINE |
| | | | | | | | | | | PROTEASE, CALCIUM-BINDING, |
| | | | | | | | | | | HYDROLASE, 3 GLYCOPROTEIN” |
| 305 | 1pp2 | R | 66 | 186 | 4.20E−28 | 0.03 | −0.12 | | | HYDROLASE CALCIUM-FREE |
| | | | | | | | | | | PHOSPHOLIPASE A = 2 = (E.C.3.1.1.4) 1PP2 4 |
| 305 | 1qfk | L | 148 | 238 | 4.20E−28 | 0.12 | 0.49 | | COAGULATION FACTOR | “SERINE PROTEASE FVIIA; FVIIA; BLOOD |
| | | | | | | | | | VIIA (LIGHT CHAIN); | COAGULATION, SERINE PROTEASE” |
| | | | | | | | | | CHAIN: L; COAGULATION | |
| | | | | | | | | | FACTOR VIIA (HEAVY | |
| | | | | | | | | | CHAIN); CHAIN: H; | |
| | | | | | | | | | TRIPEPTIDYL INHIBITOR; | |
| | | | | | | | | | CHAIN: C; | |
| 305 | 1qfk | L | 147 | 234 | 4.20E−28 | | | 61.83 | COAGULATION FACTOR | “SERINE PROTEASE FVIIA; FVIIA; BLOOD |
| | | | | | | | | | VIIA (LIGHT CHAIN); | COAGULATION, SERINE PROTEASE” |
| | | | | | | | | | CHAIN: L; COAGULATION | |
| | | | | | | | | | FACTOR VIIA (HEAVY | |
| | | | | | | | | | CHAIN); CHAIN: H; | |
| | | | | | | | | | TRIPEPTIDYL INHIBITOR; | |
| | | | | | | | | | CHAIN: C; | |
| 305 | 1skz | | 47 | 172 | 8.40E−11 | | | 50.59 | ANTISTASIN; CHAIN: NULL; | “SERINE PROTEASE INHIBITOR FACTOR |
| | | | | | | | | | | XA INHIBITOR; ANTISTASIN, CRYSTAL |
| | | | | | | | | | | STRUCTURE, FACTOR XA INHIBITOR, 2 |
| | | | | | | | | | | SERINE PROTEASE INHIBITOR, |
| | | | | | | | | | | THROMBOSIS” |
| 305 | 1tpg | | 129 | 219 | 2.10E−26 | 0.48 | 0.54 | | T-PLASMINOGEN | PLASMINOGEN ACTIVATION |
| | | | | | | | | | ACTIVATOR F1-G; 1TPG 7 | |
| | | | | | | | | | CHAIN: NULL; 1TPG 8 | |
| 305 | 1tpg | | 89 | 184 | 8.40E−25 | 0.3 | −0.01 | | T-PLASMINOGEN | PLASMINOGEN ACTIVATION |
| | | | | | | | | | ACTIVATOR F1-G; 1TPG 7 | |
| | | | | | | | | | CHAIN: NULL; 1TPG 8 | |
| 305 | 1tpg | | 166 | 250 | 1.10E−22 | 0.07 | −0.14 | | T-PLASMINOGEN | PLASMINOGEN ACTIVATION |
| | | | | | | | | | ACTIVATOR F1-G; 1TPG 7 | |
| | | | | | | | | | CHAIN: NULL; 1TPG 8 | |
| 305 | 1tpg | | 49 | 150 | 2.10E−22 | 0.45 | −0.11 | | T-PLASMINOGEN | PLASMINOGEN ACTIVATION |
| | | | | | | | | | ACTIVATOR F1-G; 1TPG 7 | |
| | | | | | | | | | CHAIN: NULL; 1TPG 8 | |
| 305 | 1tpg | | 27 | 105 | 6.30E−20 | 0.44 | 0.31 | | T-PLASMINOGEN | PLASMINOGEN ACTIVATION |
| | | | | | | | | | ACTIVATOR F1-G; 1TPG 7 | |
| | | | | | | | | | CHAIN: NULL; 1TPG 8 | |
| 305 | 1tpg | | 23 | 108 | 2.10E−22 | | | 60.81 | T-PLASMINOGEN | PLASMINOGEN ACTIVATION |
| | | | | | | | | | ACTIVATOR F1-G; 1TPG 7 | |
| | | | | | | | | | CHAIN: NULL; 1TPG 8 | |
| 305 | 1urk | | 68 | 195 | 1.90E−20 | 0.05 | 0.04 | | | “PLASMINOGEN ACTIVATION |
| | | | | | | | | | | PLASMINOGEN ACTIVATOR |
| | | | | | | | | | | (UROKINASE-TYPE) (AMINO TERMINAL |
| | | | | | | | | | | FRAGMENT) (NMR, 15 STRUCTURES)” |
| 305 | 1urk | | 63 | 196 | 1.90E−20 | | | 61.63 | | “PLASMINOGEN ACTIVATION |
| | | | | | | | | | | PLASMINOGEN ACTIVATOR |
| | | | | | | | | | | (UROKINASE-TYPE) (AMINO TERMINAL |
| | | | | | | | | | | FRAGMENT) (NMR, 15 STRUCTURES)” |
| 305 | 1vap | A | 68 | 186 | 4.20E−24 | 0.05 | −0.07 | | “PHOSPHOLIPASE A2; | “LIPID DEGRADATION PHOSPHOLIPASE |
| | | | | | | | | | CHAIN: A, B;” | A2, LIPID DEGRADATION, HYDROLASE” |
| 305 | 1vap | A | 35 | 143 | 4.20E−20 | 0.02 | −0.17 | | “PHOSPHOLIPASE A2; | “LIPID DEGRADATION PHOSPHOLIPASE |
| | | | | | | | | | CHAIN: A, B;” | A2, LIPID DEGRADATION, HYDROLASE” |
| 305 | 1vpi | | 68 | 186 | 4.20E−25 | 0 | −0.15 | | PHOSPHOLIPASE A2 | “NEUROTOXIN PHOSPHOLIPASE A2 |
| | | | | | | | | | INHIBITOR; CHAIN: NULL | INHIBITOR, X-RAY STRUCTURE, |
| | | | | | | | | | | RECOGNITION, 2 MOLECULAR |
| | | | | | | | | | | EVOLUTION, NEUROTOXIN” |
| 305 | 1whe | | 23 | 106 | 6.30E−18 | | | 53.94 | COAGULATION FACTOR X; | “GLYCOPROTEIN GLYCOPROTEIN, |
| | | | | | | | | | CHAIN: NULL; | HYDROLASE, SERINE PROTEASE, |
| | | | | | | | | | | PLASMA, BLOOD 2 COAGULATION |
| | | | | | | | | | | FACTOR” |
| 305 | 1xka | L | 147 | 237 | 3.40E−14 | | | 71.79 | “BLOOD COAGULATION | “BLOOD COAGULATION FACTOR |
| | | | | | | | | | FACTOR XA; CHAIN: L, C;” | STUART FACTOR; BLOOD |
| | | | | | | | | | | COAGULATION FACTOR, SERINE |
| | | | | | | | | | | PROTEINASE, EPIDERMAL 2 GROWTH |
| | | | | | | | | | | FACTOR LIKE DOMAIN” |
| 305 | 9wga | A | 26 | 203 | 3.40E−13 | | | 75.4 | | LECTIN (AGGLUTININ) WHEAT GERM |
| | | | | | | | | | | AGGLUTININ (ISOLECTIN 2) 9WGA 3 |
| 306 | 1a5e | | 1 | 116 | 8.50E−28 | 0.55 | 1 | | TUMOR SUPPRESSOR | “ANTI-ONCOGENE CELL CYCLE, ANTI- |
| | | | | | | | | | P16INK4A; CHAIN: NULL; | ONCOGENE, REPEAT, ANK REPEAT” |
| 306 | 1awc | B | 1 | 123 | 1.70E−36 | 0.2 | 0.99 | | “GA BINDING PROTEIN | “COMPLEX (TRANSCRIPTION |
| | | | | | | | | | ALPHA; CHAIN: A; GA | REGULATION/DNA) GABPALPHA; |
| | | | | | | | | | BINDING PROTEIN BETA 1; | GABPBETA1; COMPLEX (TRANSCRIPTION |
| | | | | | | | | | CHAIN: B; DNA; CHAIN: D, | REGULATION/DNA), DNA-BINDING, 2 |
| | | | | | | | | | E;” | NUCLEAR PROTEIN, ETS DOMAIN, |
| | | | | | | | | | | ANKYRIN REPEATS, TRANSCRIPTION 3 |
| | | | | | | | | | | FACTOR” |
| 306 | 1bd8 | | 1 | 154 | 6.80E−27 | | | 51.04 | P19INK4D CDK4/6 | “TUMOR SUPPRESSOR TUMOR |
| | | | | | | | | | INHIBITOR; CHAIN: NULL; | SUPPRESSOR, CDK4/6 INHIBITOR, |
| | | | | | | | | | | ANKYRIN MOTIF” |
| 306 | 1bi7 | B | 1 | 116 | 1.40E−28 | 0.38 | 1 | | CYCLIN-DEPENDENT | “COMPLEX (KINASE/ANTI-ONCOGENE) |
| | | | | | | | | | KINASE 6; CHAIN: A; | CDK6; P16INK4A, MTS1; CYCLIN |
| | | | | | | | | | MULTIPLE TUMOR | DEPENDENT KINASE, CYCLIN |
| | | | | | | | | | SUPPRESSOR; CHAIN: B; | DEPENDENT KINASE INHIBITORY 2 |
| | | | | | | | | | | PROTEIN, CDK, INK4, CELL CYCLE, |
| | | | | | | | | | | MULTIPLE TUMOR SUPPRESSOR, 3 MTS1, |
| | | | | | | | | | | COMPLEX (KINASE/ANTI-ONCOGENE) |
| | | | | | | | | | | HEADER” |
| 306 | 1bi7 | B | 1 | 120 | 1.40E−28 | | | 51.34 | CYCLIN-DEPENDENT | “COMPLEX (KINASE/ANTI-ONCOGENE) |
| | | | | | | | | | KINASE 6; CHAIN: A; | CDK6; P16INK4A, MTS1; CYCLIN |
| | | | | | | | | | MULTIPLE TUMOR | DEPENDENT KINASE, CYCLIN |
| | | | | | | | | | SUPPRESSOR; CHAIN: B; | DEPENDENT KINASE INHIBITORY 2 |
| | | | | | | | | | | PROTEIN, CDK, INK4, CELL CYCLE, |
| | | | | | | | | | | MULTIPLE TUMOR SUPPRESSOR, 3 MTS1, |
| | | | | | | | | | | COMPLEX (KINASE/ANTI-ONCOGENE) |
| | | | | | | | | | | HEADER” |
| 306 | 1blx | B | 4 | 149 | 3.40E−27 | 0.16 | 0.63 | | CYCLIN-DEPENDENT | “COMPLEX (INHIBITOR |
| | | | | | | | | | KINASE 6; CHAIN: A; | PROTEIN/KINASE) INHIBITOR PROTEIN, |
| | | | | | | | | | P19INK4D; CHAIN: B; | CYCLIN-DEPENDENT KINASE, CELL |
| | | | | | | | | | | CYCLE 2 CONTROL, ALPHA/BETA, |
| | | | | | | | | | | COMPLEX (INHIBITOR |
| | | | | | | | | | | PROTEIN/KINASE)” |
| 306 | 1blx | B | 1 | 158 | 3.40E−27 | | | 50.47 | CYCLIN-DEPENDENT | “COMPLEX (INHIBITOR |
| | | | | | | | | | KINASE 6; CHAIN: A; | PROTEIN/KINASE) INHIBITOR PROTEIN, |
| | | | | | | | | | P19INK4D; CHAIN: B; | CYCLIN-DEPENDENT KINASE, CELL |
| | | | | | | | | | | CYCLE 2 CONTROL, ALPHA/BETA, |
| | | | | | | | | | | COMPLEX (INHIBITOR |
| | | | | | | | | | | PROTEIN/KINASE)” |
| 306 | 1bu9 | A | 1 | 136 | 5.10E−33 | 0.18 | 0.57 | | CYCLIN-DEPENDENT | “HORMONE/GROWTH FACTOR P18- |
| | | | | | | | | | KINASE 6 INHIBITOR; | INK4C; CELL CYCLE INHIBITOR, |
| | | | | | | | | | CHAIN: A; | P18INK4C, TUMOR, SUPPRESSOR, |
| | | | | | | | | | | CYCLIN-2 DEPENDENT KINASE, |
| | | | | | | | | | | HORMONE/GROWTH FACTOR” |
| 306 | 1d9s | A | 1 | 116 | 1.70E−28 | 0.46 | 1 | | CYCLIN-DEPENDENT | “SIGNALING PROTEIN HELIX-TURN- |
| | | | | | | | | | KINASE 4 INHIBITOR B; | HELIX, ANKYRIN REPEAT” |
| | | | | | | | | | CHAIN: A; | |
| 306 | 1ihb | A | 1 | 136 | 5.10E−33 | 0.28 | 0.88 | | “CYCLIN-DEPENDENT | “CELL CYCLE INHIBITOR P18- |
| | | | | | | | | | KINASE 6 INHIBITOR; | INK4C(INK6); CELL CYCLE INHIBITOR, |
| | | | | | | | | | CHAIN: A, B;” | P18-INK4C(INK6), ANKYRIN REPEAT, 2 |
| | | | | | | | | | | CDK 4/6 INHIBITOR” |
| 306 | 1ihb | A | 1 | 153 | 5.10E−33 | | | 51.52 | “CYCLIN-DEPENDENT | “CELL CYCLE INHIBITOR P18- |
| | | | | | | | | | KINASE 6 INHIBITOR; | INK4C(INK6); CELL CYCLE INHIBITOR, |
| | | | | | | | | | CHAIN: A, B;” | P18-INK4C(INK6), ANKYRIN REPEAT, 2 |
| | | | | | | | | | | CDK 4/6 INHIBITOR” |
| 306 | 1ikn | D | 1 | 155 | 3.40E−32 | −0.14 | 0.27 | | NF-KAPPA-B P65 SUBUNIT; | “TRANSCRIPTION FACTOR P65; P50D; |
| | | | | | | | | | CHAIN: A; NF-KAPPA-B | TRANSCRIPTION FACTOR, IKB/NFKB |
| | | | | | | | | | P50D SUBUNIT; CHAIN: C; I- | COMPLEX” |
| | | | | | | | | | KAPPA-B-ALPHA; CHAIN: D; | |
| 306 | 1myo | | 2 | 118 | 3.40E−27 | −0.24 | 0.86 | | MYOTROPHIN; CHAIN: | “ANK-REPEAT MYOTROPHIN, |
| | | | | | | | | | NULL | ACETYLATION, NMR, ANK-REPEAT” |
| 306 | 1nfi | E | 1 | 155 | 3.40E−32 | −0.01 | 0.49 | | “NF-KAPPA-B P65; CHAIN: | “COMPLEX (TRANSCRIPTION REG/ANK |
| | | | | | | | | | A, C; NF-KAPPA-B P50; | REPEAT) COMPLEX (TRANSCRIPTION |
| | | | | | | | | | CHAIN: B, D; I-KAPPA-B- | REGULATION/ANK REPEAT), ANKYRIN 2 |
| | | | | | | | | | ALPHA; CHAIN: E, F;” | REPEAT HELIX” |
| 307 | 1be9 | A | 357 | 449 | 1.10E−05 | 0.12 | 0.68 | | PSD-95; CHAIN: A; CRIPT; | “PEPTIDE RECOGNITION PEPTIDE |
| | | | | | | | | | CHAIN: B; | RECOGNITION, PROTEIN |
| | | | | | | | | | | LOCALIZATION” |
| 307 | 1faq | | 841 | 883 | 1.50E−13 | 0.32 | 0.64 | | RAF-1; CHAIN: NULL; | “SERINE/THREONINE PROTEIN KINASE |
| | | | | | | | | | | TRANSFERASE, SERINE/THREONINE- |
| | | | | | | | | | | PROTEIN KINASE, 2 PROTO-ONCOGENE, |
| | | | | | | | | | | ZINC, ATP-BINDING, PHORBOL-ESTER |
| | | | | | | | | | | BINDING” |
| 307 | 1faq | | 841 | 888 | 1.70E−08 | −0.11 | 0.95 | | RAF-1; CHAIN: NULL; | “SERINE/THREONINE PROTEIN KINASE |
| | | | | | | | | | | TRANSFERASE, SERINE/THREONINE- |
| | | | | | | | | | | PROTEIN KINASE, 2 PROTO-ONCOGENE, |
| | | | | | | | | | | ZINC, ATP-BINDING, PHORBOL-ESTER |
| | | | | | | | | | | BINDING” |
| 307 | 1i16 | | 364 | 451 | 8.40E−10 | 0.47 | 0.27 | | INTERLEUKIN 16; CHAIN: | “CYTOKINE LCF; CYTOKINE, |
| | | | | | | | | | NULL; | LYMPHOCYTE CHEMOATTRACTANT |
| | | | | | | | | | | FACTOR, PDZ DOMAIN” |
| 307 | 1pdr | | 361 | 422 | 1.30E−05 | −0.23 | 0.01 | | HUMAN DISCS LARGE | “SIGNAL TRANSDUCTION HDLG, DHR3 |
| | | | | | | | | | PROTEIN; CHAIN: NULL; | DOMAIN; SIGNAL TRANSDUCTION, SH3 |
| | | | | | | | | | | DOMAIN, REPEAT” |
| 307 | 1ptq | | 841 | 888 | 1.70E−13 | 0.25 | 1 | | PROTEIN KINASE C DELTA | PHOSPHOTRANSFERASE |
| | | | | | | | | | TYPE; 1PTQ 4 | |
| 307 | 1qau | A | 364 | 448 | 6.30E−11 | 0.7 | 0.8 | | NEURONAL NITRIC OXIDE | OXIDOREDUCTASE BETA-FINGER |
| | | | | | | | | | SYNTHASE (RESIDUES 1-130); | |
| | | | | | | | | | CHAIN: A; | |
| 307 | 1qlc | A | 364 | 448 | 1.70E−10 | 0.41 | 0.76 | | POSTSYNAPTIC DENSITY | “PEPTIDE RECOGNITION PSD-95; PDZ |
| | | | | | | | | | PROTEIN 95; CHAIN: A; | DOMAIN, NEURONAL NITRIC OXIDE |
| | | | | | | | | | | SYNTHASE, NMDA RECEPTOR 2 |
| | | | | | | | | | | BINDING” |
| 307 | 1tbn | | 839 | 897 | 4.20E−14 | −0.34 | 0.45 | | “PROTEIN KINASE C, | “CALCIUM-BINDING PROTEIN RAT |
| | | | | | | | | | GAMMA TYPE; CHAIN: | BRAIN PKC-G; CALCIUM-BINDING |
| | | | | | | | | | NULL;” | PROTEIN, PROTEIN KINASE C, PKC, |
| | | | | | | | | | | TRANSFERASE” |
| 307 | 1tbn | | 838 | 896 | 6.80E−14 | −0.23 | 0.06 | | “PROTEIN KINASE C, | “CALCIUM-BINDING PROTEIN RAT |
| | | | | | | | | | GAMMA TYPE; CHAIN: | BRAIN PKC-G; CALCIUM-BINDING |
| | | | | | | | | | NULL;” | PROTEIN, PROTEIN KINASE C, PKC, |
| | | | | | | | | | | TRANSFERASE” |
| 307 | 3pdz | A | 364 | 448 | 4.20E−10 | 0.49 | 1 | | “TYROSINE PHOSPHATASE | “HYDROLASE PDZ DOMAIN, HUMAN |
| | | | | | | | | | (PTP-BAS, TYPE 1); CHAIN: | PHOSPHATASE, HPTP1E, PTP-BAS, |
| | | | | | | | | | A;” | SPECIFICITY 2 OF BINDING” |
| 308 | 1got | B | 3 | 330 | 9.60E−80 | | | 120.96 | GT-ALPHA/GI-ALPHA | “COMPLEX (GTP-BINDING/TRANSDUCER) |
| | | | | | | | | | CHIMERA; CHAIN: A; GT- | BETA1, TRANSDUCIN BETA SUBUNIT; |
| | | | | | | | | | BETA; CHAIN: B; GT- | GAMMA1, TRANSDUCIN GAMMA |
| | | | | | | | | | GAMMA; CHAIN: G; | SUBUNIT; COMPLEX (GTP- |
| | | | | | | | | | | BINDING/TRANSDUCER), G PROTEIN, |
| | | | | | | | | | | HETEROTRIMER 2 SIGNAL |
| | | | | | | | | | | TRANSDUCTION” |
| 311 | 1a06 | | 1 | 292 | 3.20E−55 | | | 66.92 | CALCIUM/CALMODULIN- | “KINASE KINASE, SIGNAL |
| | | | | | | | | | DEPENDENT PROTEIN | TRANSDUCTION, |
| | | | | | | | | | KINASE; CHAIN: NULL; | CALCIUM/CALMODULIN” |
| 311 | 1a06 | | 1 | 292 | 3.20E−55 | | | 66.92 | CALCIUM/CALMODULIN- | “KINASE KINASE, SIGNAL |
| | | | | | | | | | DEPENDENT PROTEIN | TRANSDUCTION, |
| | | | | | | | | | KINASE; CHAIN: NULL; | CALCIUM/CALMODULIN” |
| 311 | 1a6o | | 1 | 264 | 4.80E−77 | | | 129.41 | PROTEIN KINASE | “TRANSFERASE TRANSFERASE, |
| | | | | | | | | | CK2/ALPHA-SUBUNIT; | SERINE/THREONINE-PROTEIN KINASE, |
| | | | | | | | | | CHAIN: NULL; | CASEIN KINASE, 2 SER/THR KINASE” |
| 311 | 1a6o | | 1 | 264 | 4.80E−77 | | | 129.41 | PROTEIN KINASE | “TRANSFERASE TRANSFERASE, |
| | | | | | | | | | CK2/ALPHA-SUBUNIT; | SERINE/THREONINE-PROTEIN KINASE, |
| | | | | | | | | | CHAIN: NULL; | CASEIN KINASE, 2 SER/THR KINASE” |
| 311 | 1apm | E | 1 | 296 | 3.20E−43 | | | 59.72 | | “TRANSFERASE(PHOSPHOTRANSFERASE) |
| | | | | | | | | | | $C-/AMP$-DEPENDENT PROTEIN |
| | | | | | | | | | | KINASE (E.C.2.7.1.37) ($C/APK$) 1APM 3 |
| | | | | | | | | | | (CATALYTIC SUBUNIT) ““ALPHA”” |
| | | | | | | | | | | ISOENZYME MUTANT WITH SER 139 |
| | | | | | | | | | | 1APM 4 REPLACED BY ALA (/S139A$) |
| | | | | | | | | | | COMPLEX WITH THE PEPTIDE 1APM 5 |
| | | | | | | | | | | INHIBITOR PKI(5-24) AND THE |
| | | | | | | | | | | DETERGENT MEGA-8 1APM 6” |
| 311 | 1apm | E | 1 | 296 | 3.20E−43 | | | 59.72 | | “TRANSFERASE (PHOSPHOTRANSFERASE) |
| | | | | | | | | | | $C-/AMP$-DEPENDENT PROTEIN |
| | | | | | | | | | | KINASE (E.C.2.7.1.37) ($C/APK$) 1APM 3 |
| | | | | | | | | | | (CATALYTIC SUBUNIT) ““ALPHA”” |
| | | | | | | | | | | ISOENZYME MUTANT WITH SER 139 |
| | | | | | | | | | | 1APM 4 REPLACED BY ALA (/S139A$) |
| | | | | | | | | | | COMPLEX WITH THE PEPTIDE 1APM 5 |
| | | | | | | | | | | INHIBITOR PKI(5-24) AND THE |
| | | | | | | | | | | DETERGENT MEGA-8 1APM 6” |
| 311 | 1aql | | 1 | 265 | 0 | | | 142.91 | CYCLIN-DEPENDENT | “PROTEIN KINASE CDK2; PROTEIN |
| | | | | | | | | | PROTEIN KINASE 2; CHAIN: | KINASE, CELL CYCLE, |
| | | | | | | | | | NULL; | PHOSPHORYLATION, STAUROSPORINE, 2 |
| | | | | | | | | | | CELL DIVISION, MITOSIS, INHIBITION” |
| 311 | 1aql | | 1 | 265 | 0 | | | 142.91 | CYCLIN-DEPENDENT | “PROTEIN KINASE CDK2; PROTEIN |
| | | | | | | | | | PROTEIN KINASE 2; CHAIN: | KINASE, CELL CYCLE, |
| | | | | | | | | | NULL; | PHOSPHORYLATION, STAUROSPORINE, 2 |
| | | | | | | | | | | CELL DIVISION, MITOSIS, INHIBITION” |
| 311 | 1bi8 | A | 2 | 256 | 1.60E−88 | | | 160.58 | “CYCLIN-DEPENDENT | “COMPLEX (KINASE/INHIBITOR) CDK6; |
| | | | | | | | | | KINASE 6; CHAIN: A, C; | P19INK4D; CYCLIN DEPENDENT KINASE, |
| | | | | | | | | | CYCLIN-DEPENDENT | CYCLIN DEPENDENT KINASE |
| | | | | | | | | | KINASE INHIBITOR; CHAIN: | INHIBITORY 2 PROTEIN, CDK, INK4, CELL |
| | | | | | | | | | B, D;” | CYCLE, COMPLEX (KINASE/INHIBITOR) |
| | | | | | | | | | | HEADER HELIX” |
| 311 | 1bi8 | A | 2 | 256 | 1.60E−88 | | | 160.58 | “CYCLIN-DEPENDENT | “COMPLEX (KINASE/INHIBITOR) CDK6; |
| | | | | | | | | | KINASE 6; CHAIN: A, C; | P19INK4D; CYCLIN DEPENDENT KINASE, |
| | | | | | | | | | CYCLIN-DEPENDENT | CYCLIN DEPENDENT KINASE |
| | | | | | | | | | KINASE INHIBITOR; CHAIN: | INHIBITORY 2 PROTEIN, CDK, INK4, CELL |
| | | | | | | | | | B, D;” | CYCLE, COMPLEX (KINASE/INHIBITOR) |
| | | | | | | | | | | HEADER HELIX” |
| 311 | 1blx | A | 2 | 264 | 3.20E−88 | | | 140.69 | CYCLIN-DEPENDENT | “COMPLEX (INHIBITOR |
| | | | | | | | | | KINASE 6; CHAIN: A; | PROTEIN/KINASE) INHIBITOR PROTEIN, |
| | | | | | | | | | P19INK4D; CHAIN: B; | CYCLIN-DEPENDENT KINASE, CELL |
| | | | | | | | | | | CYCLE 2 CONTROL, ALPHA/BETA, |
| | | | | | | | | | | COMPLEX (INHIBITOR |
| | | | | | | | | | | PROTEIN/KINASE)” |
| 311 | 1blx | A | 2 | 264 | 3.20E−88 | | | 140.69 | CYCLIN-DEPENDENT | “COMPLEX (INHIBITOR |
| | | | | | | | | | KINASE 6; CHAIN: A; | PROTEIN/KINASE) INHIBITOR PROTEIN, |
| | | | | | | | | | P19INK4D; CHAIN: B; | CYCLIN-DEPENDENT KINASE, CELL |
| | | | | | | | | | | CYCLE 2 CONTROL, ALPHA/BETA, |
| | | | | | | | | | | COMPLEX (INHIBITOR |
| | | | | | | | | | | PROTEIN/KINASE)” |
| 311 | 1byg | A | 1 | 232 | 3.20E−21 | | | 59.7 | C-TERMINAL SRC KINASE; | “TRANSFERASE CSK; PROTEIN KINASE, |
| | | | | | | | | | CHAIN: A; | C-TERMINAL SRC KINASE, |
| | | | | | | | | | | PHOSPHORYLATION, 2 STAUROSPORINE, |
| | | | | | | | | | | TRANSFERASE” |
| 311 | 1byg | A | 1 | 232 | 3.20E−21 | | | 59.7 | C-TERMINAL SRC KINASE; | “TRANSFERASE CSK; PROTEIN KINASE, |
| | | | | | | | | | CHAIN: A; | C-TERMINAL SRC KINASE, |
| | | | | | | | | | | PHOSPHORYLATION, 2 STAUROSPORINE, |
| | | | | | | | | | | TRANSFERASE” |
| 311 | 1ctp | E | 1 | 277 | 1.60E−44 | | | 60.57 | | TRANSFERASE(PHOSPHOTRANSFERASE) |
| | | | | | | | | | | CAMP-DEPENDENT PROTEIN KINASE |
| | | | | | | | | | | (E.C.2.7.1.37) (CAPK) 1CTP 3 (CATALYTIC |
| | | | | | | | | | | SUBUNIT) 1CTP 4 |
| 311 | 1ctp | E | 1 | 277 | 1.60E−44 | | | 60.57 | | TRANSFERASE(PHOSPHOTRANSFERASE) |
| | | | | | | | | | | CAMP-DEPENDENT PROTEIN KINASE |
| | | | | | | | | | | (E.C.2.7.1.37) (CAPK) 1CTP 3 (CATALYTIC |
| | | | | | | | | | | SUBUNIT) 1CTP 4 |
| 311 | 1fgk | B | 1 | 232 | 1.60E−27 | | | 59.38 | “FGF RECEPTOR 1; CHAIN: | “PHOSPHOTRANSFERASE FGFR1K, |
| | | | | | | | | | A, B;” | FIBROBLAST GROWTH FACTOR |
| | | | | | | | | | | RECEPTOR 1; TRANSFERASE, TYROSINE- |
| | | | | | | | | | | PROTEIN KINASE, ATP-BINDING, 2 |
| | | | | | | | | | | PHOSPHORYLATION, RECEPTOR, |
| | | | | | | | | | | PHOSPHOTRANSFERASE” |
| 311 | 1fgk | A | 1 | 233 | 1.60E−22 | | | 70.44 | “FGF RECEPTOR 1; CHAIN: | “PHOSPHOTRANSFERASE FGFR1K, |
| | | | | | | | | | A, B;” | FIBROBLAST GROWTH FACTOR |
| | | | | | | | | | | RECEPTOR 1; TRANSFERASE, TYROSINE- |
| | | | | | | | | | | PROTEIN KINASE, ATP-BINDING, 2 |
| | | | | | | | | | | PHOSPHORYLATTON, RECEPTOR, |
| | | | | | | | | | | PHOSPHOTRANSFERASE” |
| 311 | 1fgk | B | 1 | 232 | 1.60E−27 | | | 59.38 | “FGF RECEPTOR 1; CHAIN: | “PHOSPHOTRANSFERASE FGFR1K, |
| | | | | | | | | | A, B;” | FIBROBLAST GROWTH FACTOR |
| | | | | | | | | | | RECEPTOR 1; TRANSFERASE, TYROSINE- |
| | | | | | | | | | | PROTEIN KINASE, ATP-BINDING, 2 |
| | | | | | | | | | | PHOSPHORYLATION, RECEPTOR, |
| | | | | | | | | | | PHOSPHOTRANSFERASE” |
| 311 | 1fgk | A | 1 | 233 | 1.60E−22 | | | 70.44 | “FGF RECEPTOR 1; CHAIN: | “PHOSPHOTRANSFERASE FGFR1K, |
| | | | | | | | | | A, B;” | FIBROBLAST GROWTH FACTOR |
| | | | | | | | | | | RECEPTOR 1; TRANSFERASE, TYROSINE- |
| | | | | | | | | | | PROTEIN KINASE, ATP-BINDING, 2 |
| | | | | | | | | | | PHOSPHORYLATION, RECEPTOR, |
| | | | | | | | | | | PHOSPHOTRANSFERASE” |
| 311 | 1hcl | | 1 | 265 | 0 | | | 155.25 | HUMAN CYCLIN- | “PROTEIN KINASE CDK2; TRANSFERASE, |
| | | | | | | | | | DEPENDENT KINASE 2; | SERINE/THREONINE PROTEIN KINASE, |
| | | | | | | | | | CHAIN: NULL; | ATP-BINDING, 2 CELL CYCLE, CELL |
| | | | | | | | | | | DIVISION, MITOSIS, PHOSPHORYLATION” |
| 311 | 1hcl | | 1 | 265 | 0 | | | 155.25 | HUMAN CYCLIN- | “PROTEIN KINASE CDK2; TRANSFERASE, |
| | | | | | | | | | DEPENDENT KINASE 2; | SERINE/THREONINE PROTEIN KINASE, |
| | | | | | | | | | CHAIN: NULL; | ATP-BINDING, 2 CELL CYCLE, CELL |
| | | | | | | | | | | DIVISION, MITOSIS, PHOSPHORYLATION” |
| 311 | 1ian | | 1 | 313 | 3.20E−94 | | | 118.83 | P38 MAP KINASE; CHAIN: | “SERINE/THREONINE-PROTEIN KINASE |
| | | | | | | | | | NULL; | CSBP, RK, P38; PROTEIN SER/THR- |
| | | | | | | | | | | KINASE, SERINE/THREONINE-PROTEIN |
| | | | | | | | | | | KINASE” |
| 311 | 1ian | | 1 | 313 | 3.20E−94 | | | 118.83 | P38 MAP KINASE; CHAIN: | “SERINE/THREONINE-PROTEIN KINASE |
| | | | | | | | | | NULL; | CSBP, RK, P38; PROTEIN SER/THR- |
| | | | | | | | | | | KINASE, SERINE/THREONINE-PROTEIN |
| | | | | | | | | | | KINASE” |
| 311 | 1jnk | | 1 | 297 | 6.40E−90 | | | 122.01 | C-JUN N-TERMINAL | “TRANSFERASE JNK3; TRANSFERASE, |
| | | | | | | | | | KINASE; CHAIN: NULL; | JNK3 MAP KINASE, SERINE/THREONINE |
| | | | | | | | | | | PROTEIN 2 KINASE” |
| 311 | 1jnk | | 1 | 297 | 6.40E−90 | | | 122.01 | C-JUN N-TERMINAL | “TRANSFERASE JNK3; TRANSFERASE, |
| | | | | | | | | | KINASE; CHAIN: NULL; | JNK3 MAP KINASE, SERINE/THREONINE |
| | | | | | | | | | | PROTEIN 2 KINASE” |
| 311 | 1kob | A | 1 | 314 | 6.40E−51 | | | 86.64 | “TWITCHIN; CHAIN: A, B;” | “KINASE KINASE, TWITCHIN, |
| | | | | | | | | | | INTRASTERIC REGULATION” |
| 311 | 1kob | A | 1 | 314 | 6.40E−51 | | | 86.64 | “TWITCHIN; CHAIN: A, B;” | “KINASE KINASE, TWITCHIN, |
| | | | | | | | | | | INTRASTERIC REGULATION” |
| 311 | 1p38 | | 1 | 302 | 0 | | | 141.43 | MAP KINASE P38; CHAIN: | “TRANSPERASE MITOGEN ACTIVATED |
| | | | | | | | | | NULL; | PROTEIN KINASE; TRANSFERASE, MAP |
| | | | | | | | | | | KINASE, SERINE/THREONINE-PROTEIN |
| | | | | | | | | | | KINASE, 2 P38” |
| 311 | 1p38 | | 1 | 302 | 0 | | | 141.43 | MAP KINASE P38; CHAIN: | “TRANSFERASE MITOGEN ACTIVATED |
| | | | | | | | | | NULL; | PROTEIN KINASE; TRANSFERASE, MAP |
| | | | | | | | | | | KINASE, SERINE/THREONINE-PROTEIN |
| | | | | | | | | | | KINASE, 2 P38” |
| 311 | 1phk | | 1 | 257 | 1.60E−57 | | | 75.22 | PHOSPHORYLASE KINASE; | “KINASE RABBIT MUSCLE |
| | | | | | | | | | CHAIN: NULL; | PHOSPHORYLASE KINASE; GLYCOGEN |
| | | | | | | | | | | METABOLISM, TRANSFERASE, |
| | | | | | | | | | | SERINE/THREONINE-PROTEIN, 2 KINASE, |
| | | | | | | | | | | ATP-BINDING, CALMODULIN-BINDING” |
| 311 | 1phk | | 1 | 257 | 1.60E−57 | | | 75.22 | PHOSPHORYLASE KINASE; | “KINASE RABBIT MUSCLE |
| | | | | | | | | | CHAIN: NULL; | PHOSPHORYLASE KINASE; GLYCOGEN |
| | | | | | | | | | | METABOLISM, TRANSFERASE, |
| | | | | | | | | | | SERINE/THREONINE-PROTEIN, 2 KINASE, |
| | | | | | | | | | | ATP-BINDING, CALMODULIN-BINDING” |
| 311 | 1pme | | 2 | 295 | 0 | | | 162.83 | ERK2; CHAIN: NULL; | “TRANSFERASE MAP KINASE, |
| | | | | | | | | | | SERINE/THREONINE PROTEIN KINASE, |
| | | | | | | | | | | TRANSFERASE” |
| 311 | 1pme | | 2 | 295 | 0 | | | 162.83 | ERK2; CHAIN: NULL; | “TRANSFERASE MAP KINASE, |
| | | | | | | | | | | SERINE/THREONINE PROTEIN KINASE, |
| | | | | | | | | | | TRANSFERASE” |
| 311 | 1tki | A | 1 | 315 | 1.40E−43 | | | 88.24 | “TITIN; CHAIN: A, B;” | “SERINE KINASE SERINE KINASE, TITIN, |
| | | | | | | | | | | MUSCLE, AUTOINHIBITION” |
| 311 | 1tki | A | 1 | 315 | 1.40E−43 | | | 88.24 | “TITIN; CHAIN: A, B;” | “SERINE KINASE SERINE KINASE, TITIN, |
| | | | | | | | | | | MUSCLE, AUTOINHIBITION” |
| 311 | 3erk | | 2 | 312 | 0 | | | 165.29 | EXTRACELLULAR | “TRANSFERASE MITOGEN ACTIVATED |
| | | | | | | | | | REGULATED KINASE 2; | PROTEIN KINASE, MAP 2, ERK2; |
| | | | | | | | | | CHAIN: NULL; | TRANSFERASE, SERINE/THREONINE- |
| | | | | | | | | | | PROTEIN KINASE, MAP KINASE, 2 ERK2” |
| 311 | 3erk | | 2 | 312 | 0 | | | 165.29 | EXTRACELLULAR | “TRANSFERASE MITOGEN ACTIVATED |
| | | | | | | | | | REGULATED KINASE 2; | PROTEIN KINASE, MAP 2, ERK2; |
| | | | | | | | | | CHAIN: NULL; | TRANSFERASE, SERINE/THREONINE- |
| | | | | | | | | | | PROTEIN KINASE, MAP KINASE, 2 ERK2” |
| 312 | 1a4y | A | 385 | 874 | 1.60E−39 | | | 120.16 | “RIBONUCLEASE | “COMPLEX (INHIBITOR/NUCLEASE) |
| | | | | | | | | | INHIBITOR; CHAIN: A, D; | COMPLEX (INHIBITOR/NUCLEASE), |
| | | | | | | | | | ANGIOGENIN; CHAIN: B, E;” | COMPLEX (RI-ANG), HYDROLASE 2 |
| | | | | | | | | | | MOLECULAR RECOGNITION, EPITOPE |
| | | | | | | | | | | MAPPING, LEUCINE-RICH 3 REPEATS” |
| 312 | 2bnh | | 389 | 874 | 1.10E−46 | | | 125.28 | RIBONUCLEASE | “ACETYLATION RNASE INHIBITOR, |
| | | | | | | | | | INHIBITOR; CHAIN: NULL; | RIBONUCLEASE/ANGIOGENIN |
| | | | | | | | | | | INHIBITOR ACETYLATION, LEUCINE- |
| | | | | | | | | | | RICH REPEATS” |
| 313 | 1bu2 | A | 35 | 189 | 4.20E−23 | −0.27 | 0.33 | | CYCLIN HOMOLOG; CHAIN: | “CELL CYCLE REGULATION CELL CYCLE |
| | | | | | | | | | A; | REGULATION, HERPESVIRUS SAIMIRI, |
| | | | | | | | | | | VIRAL CYCLIN” |
| 313 | 1jkw | | 35 | 194 | 6.30E−14 | −0.31 | 0.06 | | CYCLIN H; CHAIN: NULL; | “CELL DIVISION RCYCLIN H |
| | | | | | | | | | | (RECOMBINANT); CYCLIN, CELL CYCLE, |
| | | | | | | | | | | CELL DIVISION, NUCLEAR PROTEIN” |
| 313 | 1qmz | B | 80 | 230 | 1.70E−32 | −0.32 | 0.57 | | “CELL DIVISION PROTEIN | “COMPLEX (PROTEIN KINASE/CYCLIN) |
| | | | | | | | | | KINASE 2; CHAIN: A, C; | CYCLIN-DEPENDENT KINASE-2, CDK2, |
| | | | | | | | | | G2/MITOTIC-SPECIFIC | P33 PROTEIN KINASE; CCNA, CCN1; |
| | | | | | | | | | CYCLIN A; CHAIN: B, D; | COMPLEX (PROTEIN KINASE/CYCLIN), |
| | | | | | | | | | SUBSTRATE PEPTIDE; | CYCLIN, CDK, 2 PHOSPHORYLATION, |
| | | | | | | | | | CHAIN: E, F;” | SUBSTRATE COMPLEX” |
| 313 | 1vin | | 80 | 230 | 1.70E−33 | −0.14 | 0.57 | | CYCLIN A; CHAIN: NULL; | “BINDING PROTEIN CYCLIN, CELL |
| | | | | | | | | | | CYCLE, KINASE-REGULATORY-SUBUNIT, |
| | | | | | | | | | | 2 BINDING PROTEIN” |
| 313 | 1vin | | 35 | 195 | 4.20E−21 | 0.01 | 0.92 | | CYCLIN A; CHAIN: NULL; | “BINDING PROTEIN CYCLIN, CELL |
| | | | | | | | | | | CYCLE, KINASE-REGULATORY-SUBUNIT, |
| | | | | | | | | | | 2 BINDING PROTEIN” |
| 315 | 1aut | L | 431 | 532 | 4.20E−17 | 0.33 | −0.01 | | “ACTIVATED PROTEIN C; | “COMPLEX (BLOOD |
| | | | | | | | | | CHAIN: C, L; D-PHE-PRO- | COAGULATION/INHIBITOR) |
| | | | | | | | | | MAI; CHAIN: P;” | AUTOPROTHROMBIN IIA; HYDROLASE, |
| | | | | | | | | | | SERINE PROTEINASE), PLASMA |
| | | | | | | | | | | CALCIUM BINDING, 2 GLYCOPROTEIN, |
| | | | | | | | | | | COMPLEX (BLOOD |
| | | | | | | | | | | COAGULATION/INHIBITOR)” |
| 315 | 1aut | L | 1054 | 1154 | 4.20E−15 | −0.15 | 0.31 | | “ACTIVATED PROTEIN C; | “COMPLEX (BLOOD |
| | | | | | | | | | CHAIN: C, L; D-PHE-PRO- | COAGULATION/INHIBITOR) |
| | | | | | | | | | MAI; CHAIN: P;” | AUTOPROTHROMBIN IIA; HYDROLASE, |
| | | | | | | | | | | SERINE PROTEINASE), PLASMA |
| | | | | | | | | | | CALCIUM BINDING, 2 GLYCOPROTEIN, |
| | | | | | | | | | | COMPLEX (BLOOD |
| | | | | | | | | | | COAGULATION/INHIBITOR)” |
| 315 | 1aut | L | 1331 | 1423 | 2.10E−13 | −0.31 | 0.45 | | “ACTIVATED PROTEIN C; | “COMPLEX (BLOOD |
| | | | | | | | | | CHAIN: C, L; D-PHE-PRO- | COAGULATION/INHIBITOR) |
| | | | | | | | | | MAI; CHAIN: P;” | AUTOPROTHROMBIN IIA; HYDROLASE, |
| | | | | | | | | | | SERINE PROTEINASE), PLASMA |
| | | | | | | | | | | CALCIUM BINDING, 2 GLYCOPROTEIN, |
| | | | | | | | | | | COMPLEX (BLOOD |
| | | | | | | | | | | COAGULATION/INHIBITOR)” |
| 315 | 1aut | L | 846 | 920 | 1.30E−12 | 0.19 | 0.19 | | “ACTIVATED PROTEIN C; | “COMPLEX (BLOOD |
| | | | | | | | | | CHAIN: C, L; D-PHE-PRO- | COAGULATION/INHIBITOR) |
| | | | | | | | | | MAI; CHAIN: P;” | AUTOPROTHROMBIN IIA; HYDROLASE, |
| | | | | | | | | | | SERINE PROTEINASE), PLASMA |
| | | | | | | | | | | CALCIUM BINDING, 2 GLYCOPROTEIN, |
| | | | | | | | | | | COMPLEX (BLOOD |
| | | | | | | | | | | COAGULATION/INHIBITOR)” |
| 315 | 1cej | A | 1054 | 1137 | 4.20E−16 | 0.04 | 0.11 | | MEROZOITE SURFACE | “SURFACE PROTEIN MEROZOITE |
| | | | | | | | | | PROTEIN 1; CHAIN: A; | SURFACE ANTIGEN 1, MAJOR BLOOD- |
| | | | | | | | | | | STAGE EGF-LIKE DOMAIN, |
| | | | | | | | | | | EXTRACELLULAR, MODULAR PROTEIN, |
| | | | | | | | | | | SURFACE 2 ANTIGEN, MALARIA |
| | | | | | | | | | | VACCINE COMPONENT, SURFACE |
| | | | | | | | | | | PROTEIN” |
| 315 | 1cej | A | 1337 | 1420 | 6.30E−14 | −0.05 | 0.54 | | MEROZOITE SURFACE | “SURFACE PROTEIN MEROZOITE |
| | | | | | | | | | PROTEIN 1; CHAIN: A; | SURFACE ANTIGEN 1, MAJOR BLOOD- |
| | | | | | | | | | | STAGE EGF-LIKE DOMAIN, |
| | | | | | | | | | | EXTRACELLULAR, MODULAR PROTEIN, |
| | | | | | | | | | | SURFACE 2 ANTIGEN, MALARIA |
| | | | | | | | | | | VACCINE COMPONENT, SURFACE |
| | | | | | | | | | | PROTEIN” |
| 315 | 1cej | A | 848 | 920 | 1.90E−13 | 0.1 | −0.06 | | MEROZOITE SURFACE | “SURFACE PROTEIN MEROZOITE |
| | | | | | | | | | PROTEIN 1; CHAIN: A; | SURFACE ANTIGEN 1, MAJOR BLOOD- |
| | | | | | | | | | | STAGE EGF-LIKE DOMAIN, |
| | | | | | | | | | | EXTRACELLULAR, MODULAR PROTEIN, |
| | | | | | | | | | | SURFACE 2 ANTIGEN, MALARIA |
| | | | | | | | | | | VACCINE COMPONENT, SURFACE |
| | | | | | | | | | | PROTEIN” |
| 315 | 1cej | A | 244 | 332 | 4.20E−10 | 0.02 | 0.01 | | MEROZOITE SURFACE | “SURFACE PROTEIN MEROZOITE |
| | | | | | | | | | PROTEIN 1; CHAIN: A; | SURFACE ANTIGEN 1, MAJOR BLOOD- |
| | | | | | | | | | | STAGE EGF-LIKE DOMAIN, |
| | | | | | | | | | | EXTRACELLULAR, MODULAR PROTEIN, |
| | | | | | | | | | | SURFACE 2 ANTIGEN, MALARIA |
| | | | | | | | | | | VACCINE COMPONENT, SURFACE |
| | | | | | | | | | | PROTEIN” |
| 315 | 1dan | L | 696 | 822 | 1.10E−27 | 0 | 0.15 | | “BLOOD COAGULATION | “BLOOD COAGULATION, SERINE |
| | | | | | | | | | FACTOR VIIA; CHAIN: L, H; | PROTEASE, COMPLEX, CO-FACTOR, 2 |
| | | | | | | | | | SOLUBLE TISSUE FACTOR; | RECEPTOR ENZYME, INHIBITOR, GLA, |
| | | | | | | | | | CHAIN: T, U; D-PHE-PHE- | EGF, 3 COMPLEX (SERINE |
| | | | | | | | | | ARG- | PROTEASE/COFACTOR/LIGAND)” |
| | | | | | | | | | CHLOROMETHYLKETONE | |
| | | | | | | | | | (DFFRCMK) WITH CHAIN: | |
| | | | | | | | | | C;” | |
| 315 | 1dan | L | 448 | 574 | 6.30E−26 | 0.13 | 0.15 | | “BLOOD COAGULATION | “BLOOD COAGULATION, SERINE |
| | | | | | | | | | FACTOR VIIA; CHAIN: L, H; | PROTEASE, COMPLEX, CO-FACTOR, 2 |
| | | | | | | | | | SOLUBLE TISSUE FACTOR; | RECEPTOR ENZYME, INHIBITOR, GLA, |
| | | | | | | | | | CHAIN: T, U; D-PHE-PHE- | EGF, 3 COMPLEX (SERINE |
| | | | | | | | | | ARG- | PROTEASE/COFACTOR/LIGAND)” |
| | | | | | | | | | CHLOROMETHYLKETONE | |
| | | | | | | | | | (DFFRCMK) WITH CHAIN: | |
| | | | | | | | | | C;” | |
| 315 | 1dan | L | 574 | 696 | 1.10E−25 | 0.12 | 0.07 | | “BLOOD COAGULATION | “BLOOD COAGULATION, SERINE |
| | | | | | | | | | FACTOR VIIA; CHAIN: L, H; | PROTEASE, COMPLEX, CO-FACTOR, 2 |
| | | | | | | | | | SOLUBLE TISSUE FACTOR; | RECEPTOR ENZYME, INHIBITOR, GLA, |
| | | | | | | | | | CHAIN: T, U; D-PHE-PHE- | EGF, 3 COMPLEX (SERINE |
| | | | | | | | | | ARG- | PROTEASE/COFACTOR/LIGAND)” |
| | | | | | | | | | CELOROMETHYLKETONE | |
| | | | | | | | | | (DFFRCMK) WITH CHAIN: | |
| | | | | | | | | | C;” | |
| 315 | 1dan | L | 738 | 865 | 2.10E−25 | 0.12 | 0.05 | | “BLOOD COAGULATION | “BLOOD COAGULATION, SERINE |
| | | | | | | | | | FACTOR VIIA; CHAIN: L, H; | PROTEASE, COMPLEX, CO-FACTOR, 2 |
| | | | | | | | | | SOLUBLE TISSUE FACTOR; | RECEPTOR ENZYME, INHIBITOR, GLA, |
| | | | | | | | | | CHAIN: T, U; D-PHE-PHE- | EGF, 3 COMPLEX (SERINE |
| | | | | | | | | | ARG- | PROTEASE/COFACTOR/LIGAND)” |
| | | | | | | | | | CHLOROMETHYLKETONE | |
| | | | | | | | | | (DFFRCMK) WITH CHAIN: | |
| | | | | | | | | | C;” | |
| 315 | 1dan | L | 490 | 613 | 6.30E−25 | 0.31 | 0.09 | | “BLOOD COAGULATION | “BLOOD COAGULATION, SERINE |
| | | | | | | | | | FACTOR VIIA; CHAIN: L, H; | PROTEASE, COMPLEX, CO-FACTOR, 2 |
| | | | | | | | | | SOLUBLE TISSUE FACTOR; | RECEPTOR ENZYME, INHIBITOR, GLA, |
| | | | | | | | | | CHAIN: T, U; D-PHE-PHE- | EGF, 3 COMPLEX (SERINE |
| | | | | | | | | | ARG- | PROTEASE/COFACTOR/LIGAND)” |
| | | | | | | | | | CHLOROMETHYLKETONE | |
| | | | | | | | | | (DFFRCMK) WITH CHAIN: | |
| | | | | | | | | | C;” | |
| 315 | 1dan | L | 781 | 903 | 1.90E−24 | 0.34 | 0.3 | | “BLOOD COAGULATION | “BLOOD COAGULATION, SERINE |
| | | | | | | | | | FACTOR VIIA; CHAIN: L, II; | PROTEASE, COMPLEX, CO-FACTOR, 2 |
| | | | | | | | | | SOLUBLE TISSUE FACTOR; | RECEPTOR ENZYME, INHIBITOR, GLA, |
| | | | | | | | | | CHAIN: T, U; D-PHE-PHE- | EGF, 3 COMPLEX (SERINE |
| | | | | | | | | | ARG- | PROTEASE/COFACTOR/LIGAND)” |
| | | | | | | | | | CHLOROMETHYLKETONE | |
| | | | | | | | | | (DFFRCMK) WITH CHAIN: | |
| | | | | | | | | | C;” | |
| 315 | 1dan | L | 613 | 732 | 2.10E−24 | 0.23 | 0.06 | | “BLOOD COAGULATION | “BLOOD COAGULATION, SERINE |
| | | | | | | | | | FACTOR VIIA; CHAIN: L, H; | PROTEASE, COMPLEX, CO-FACTOR, 2 |
| | | | | | | | | | SOLUBLE TISSUE FACTOR; | RECEPTOR ENZYME, INHIBITOR, GLA, |
| | | | | | | | | | CHAIN: T, U; D-PHE-PHE- | EGF, 3 COMPLEX (SERINE |
| | | | | | | | | | ARG- | PROTEASE/COFACTOR/LIGAND)” |
| | | | | | | | | | CHLOROMETHYLKETONE | |
| | | | | | | | | | (DFFRCMK) WITH CHAIN: | |
| | | | | | | | | | C;” | |
| 315 | 1dan | L | 1007 | 1148 | 1.70E−16 | 0.29 | 0.33 | | “BLOOD COAGULATION | “BLOOD COAGULATION, SERINE |
| | | | | | | | | | FACTOR VIIA; CHAIN: L, H; | PROTEASE, COMPLEX, CO-FACTOR, 2 |
| | | | | | | | | | SOLUBLE TISSUE FACTOR; | RECEPTOR ENZYME, INHIBITOR, GLA, |
| | | | | | | | | | CHAIN: T, U; D-PHE-PHE- | EGF, 3 COMPLEX (SERINE |
| | | | | | | | | | ARG- | PROTEASE/COFACTOR/LIGAND)” |
| | | | | | | | | | CHLOROMETHYLKETONE | |
| | | | | | | | | | (DFFRCMK) WITH CHAIN: | |
| | | | | | | | | | C;” | |
| 315 | 1dan | L | 822 | 920 | 1.70E−16 | 0.11 | 0.15 | | “BLOOD COAGULATION | “BLOOD COAGULATION, SERINE |
| | | | | | | | | | FACTOR VIIA; CHAIN: L, H; | PROTEASE, COMPLEX, CO-FACTOR, 2 |
| | | | | | | | | | SOLUBLE TISSUE FACTOR; | RECEPTOR ENZYME, INHIBITOR, GLA, |
| | | | | | | | | | CHAIN: T, U; D-PHE-PHE- | EGF, 3 COMPLEX (SERINE |
| | | | | | | | | | ARG- | PROTEASE/COFACTOR/LIGAND)” |
| | | | | | | | | | CHLOROMETHYLKETONE | |
| | | | | | | | | | (DFFRCMK) WITH CHAIN: | |
| | | | | | | | | | C;” | |
| 315 | 1dan | L | 436 | 527 | 4.20E−16 | 0.14 | 0.31 | | “BLOOD COAGULATION | “BLOOD COAGULATION, SERINE |
| | | | | | | | | | FACTOR VIIA; CHAIN: L, H; | PROTEASE, COMPLEX, CO-FACTOR, 2 |
| | | | | | | | | | SOLUBLE TISSUE FACTOR; | RECEPTOR ENZYME, INHIBITOR, GLA, |
| | | | | | | | | | CHAIN: T, U; D-PHE-PHE- | EGF, 3 COMPLEX (SERINE |
| | | | | | | | | | ARG- | PROTEASE/COFACTOR/LIGAND)” |
| | | | | | | | | | CHLOROMETHYLKETONE | |
| | | | | | | | | | (DFFRCMK) WITH CHAIN: | |
| | | | | | | | | | C;” | |
| 315 | 1dan | L | 207 | 292 | 3.40E−13 | 0.33 | −0.06 | | “BLOOD COAGULATION | “BLOOD COAGULATION, SERINE |
| | | | | | | | | | FACTOR VIIA; CHAIN: L, H; | PROTEASE, COMPLEX, CO-FACTOR, 2 |
| | | | | | | | | | SOLUBLE TISSUE FACTOR; | RECEPTOR ENZYME, INHIBITOR, GLA, |
| | | | | | | | | | CHAIN: T, U; D-PHE-PHE- | EGF, 3 COMPLEX (SERINE |
| | | | | | | | | | ARG- | PROTEASE/COFACTOR/LIGAND)” |
| | | | | | | | | | CHLOROMETHYLKETONE | |
| | | | | | | | | | (DFFRCMK) WITH CHAIN: | |
| | | | | | | | | | C;” | |
| 315 | 1dan | L | 244 | 329 | 5.10E−13 | −0.21 | 0.15 | | “BLOOD COAGULATION | “BLOOD COAGULATION, SERINE |
| | | | | | | | | | FACTOR VIIA; CHAIN: L, H; | PROTEASE, COMPLEX, CO-FACTOR, 2 |
| | | | | | | | | | SOLUBLE TISSUE FACTOR; | RECEPTOR ENZYME, INHIBITOR, GLA, |
| | | | | | | | | | CHAIN: T, U; D-PHE-PHE- | EGF, 3 COMPLEX (SERINE |
| | | | | | | | | | ARG- | PROTEASE/COFACTOR/LIGAND)” |
| | | | | | | | | | CHLOROMETHYLKETONE | |
| | | | | | | | | | (DFFRCMK) WITH CHAIN: | |
| | | | | | | | | | C;” | |
| 315 | 1dan | L | 1102 | 1200 | 1.40E−12 | −0.21 | 0.52 | | “BLOOD COAGULATION | “BLOOD COAGULATION, SERINE |
| | | | | | | | | | FACTOR VIIA; CHAIN: L, H; | PROTEASE, COMPLEX, CO-FACTOR, 2 |
| | | | | | | | | | SOLUBLE TISSUE FACTOR; | RECEPTOR ENZYME, INHIBITOR, GLA, |
| | | | | | | | | | CHAIN: T, U; D-PHE-PHE- | EGF, 3 COMPLEX (SERINE |
| | | | | | | | | | ARG- | PROTEASE/COFACTOR/LIGAND)” |
| | | | | | | | | | CHLOROMETHYLKETONE | |
| | | | | | | | | | (DFFRCMK) WITH CHAIN: | |
| | | | | | | | | | C;” | |
| 315 | 1dan | L | 321 | 391 | 3.40E−10 | 0.07 | −0.2 | | “BLOOD COAGULATION | “BLOOD COAGULATION, SERINE |
| | | | | | | | | | FACTOR VIIA; CHAIN: L, H; | PROTEASE, COMPLEX, CO-FACTOR, 2 |
| | | | | | | | | | SOLUBLE TISSUE FACTOR; | RECEPTOR ENZYME, INHIBITOR, GLA, |
| | | | | | | | | | CHAIN: T, U; D-PHE-PHE- | EGF, 3 COMPLEX (SERINE |
| | | | | | | | | | ARG- | PROTEASE/COFACTOR/LIGAND)” |
| | | | | | | | | | CHLOROMETHYLKETONE | |
| | | | | | | | | | (DFFRCMK) WITH CHAIN: | |
| | | | | | | | | | C;” | |
| 315 | 1dva | L | 555 | 650 | 2.10E−26 | 0.3 | 0.35 | | “DES-GLA FACTOR VIIA | HYDROLASE/HYDROLASE INHIBITOR |
| | | | | | | | | | (HEAVY CHAIN); CHAIN: H, | PROTEIN-PEPTIDE COMPLEX |
| | | | | | | | | | I; DES-GLA FACTOR VIIA | |
| | | | | | | | | | (LIGHT CHAIN); CHAIN: L, | |
| | | | | | | | | | M; (DPN)-PHE-ARG; CHAIN: | |
| | | | | | | | | | C, D; PEPTIDE E-76; CHAIN: | |
| | | | | | | | | | X, Y;” | |
| 315 | 1dva | L | 1054 | 1148 | 4.20E−14 | 0.12 | 0.88 | | “DES-GLA FACTOR VIIA | HYDROLASE/HYDROLASE INHIBITOR |
| | | | | | | | | | (HEAVY CHAIN); CHAIN: H, | PROTEIN-PEPTIDE COMPLEX |
| | | | | | | | | | I; DES-GLA FACTOR VIIA | |
| | | | | | | | | | (LIGHT CHAIN); CHAIN: L, | |
| | | | | | | | | | M; (DPN)-PHE-ARG; CHAIN: | |
| | | | | | | | | | C, D; PEPTIDE E-76; CHAIN: | |
| | | | | | | | | | X, Y;” | |
| 315 | 1dva | L | 207 | 292 | 3.40E−13 | 0.41 | −0.06 | | “DES-GLA FACTOR VIIA | HYDROLASE/HYDROLASE INHIBITOR |
| | | | | | | | | | (HEAVY CHAIN); CHAIN: H, | PROTEIN-PEPTIDE COMPLEX |
| | | | | | | | | | I; DES-GLA FACTOR VIIA | |
| | | | | | | | | | (LIGHT CHAIN); CHAIN: L, | |
| | | | | | | | | | M; (DPN)-PHE-ARG; CHAIN: | |
| | | | | | | | | | C, D; PEPTIDE E-76; CHAIN: | |
| | | | | | | | | | X, Y;” | |
| 315 | 1dva | L | 1338 | 1423 | 5.10E−13 | −0.37 | 0.13 | | “DES-GLA FACTOR VIIA | HYDROLASE/HYDROLASE INHIBITOR |
| | | | | | | | | | (HEAVY CHAIN); CHAIN: H, | PROTEIN-PEPTIDE COMPLEX |
| | | | | | | | | | I; DES-GLA FACTOR VIIA | |
| | | | | | | | | | (LIGHT CHAIN); CHAIN: L, | |
| | | | | | | | | | M; (DPN)-PHE-ARG; CHAIN: | |
| | | | | | | | | | C, D; PEPTIDE E-76; CHAIN: | |
| | | | | | | | | | X, Y;” | |
| 315 | 1dva | L | 244 | 329 | 5.10E−13 | −0.2 | 0.11 | | “DES-GLA FACTOR VIIA | HYDROLASE/HYDROLASE INHIBITOR |
| | | | | | | | | | (HEAVY CHAIN); CHAIN: H, | PROTEIN-PEPTIDE COMPLEX |
| | | | | | | | | | I; DES-GLA FACTOR VIIA | |
| | | | | | | | | | (LIGHT CHAIN); CHAIN: L, | |
| | | | | | | | | | M; (DPN)-PHE-ARG; CHAIN: | |
| | | | | | | | | | C, D; PEPTIDE E-76; CHAIN: | |
| | | | | | | | | | X, Y;” | |
| 315 | 1dx5 | I | 557 | 679 | 4.20E−28 | 0 | 0.9 | | “THROMBIN LIGHT CHAIN; | “SERINE PROTEINASE COAGULATION |
| | | | | | | | | | CHAIN: A, B, C, D; | FACTOR II; COAGULATION FACTOR II; |
| | | | | | | | | | THROMBIN HEAVY CHAIN; | FETOMODULIN, TM, CD141 ANTIGEN; |
| | | | | | | | | | CHAIN: M, N, O, P; | EGR-CMK SERINE PROTEINASE, EGF- |
| | | | | | | | | | THROMBOMODULIN; | LIKE DOMAINS, ANTICOAGULANT |
| | | | | | | | | | CHAIN: I, J, K, L; THROMBIN | COMPLEX, 2 ANTIFIBRINOLYTIC |
| | | | | | | | | | INHIBITOR L-GLU-L-GLY-L- | COMPLEX” |
| | | | | | | | | | ARM; CHAIN: E, F, G, H;” | |
| 315 | 1dx5 | I | 721 | 846 | 1.90E−25 | 0.24 | 1 | | “THROMBIN LIGHT CHAIN; | “SERINE PROTEINASE COAGULATION |
| | | | | | | | | | CHAIN: A, B, C, D; | FACTOR II; COAGULATION FACTOR II; |
| | | | | | | | | | THROMBIN HEAVY CHAIN; | FETOMODULIN, TM, CD141 ANTIGEN; |
| | | | | | | | | | CHAIN: M, N, O, P; | EGR-CMK SERINE PROTEINASE, EGF- |
| | | | | | | | | | THROMBOMODULIN; | LIKE DOMAINS, ANTICOAGULANT |
| | | | | | | | | | CHAIN: I, J, K, L; THROMBIN | COMPLEX, 2 ANTIFIBRINOLYTIC |
| | | | | | | | | | INHIBITOR L-GLU-L-GLY-L- | COMPLEX” |
| | | | | | | | | | ARM; CHAIN: E, F, G, H;” | |
| 315 | 1dx5 | I | 596 | 721 | 1.30E−24 | 0.23 | 0.51 | | “THROMBIN LIGHT CHAIN; | “SERINE PROTEINASE COAGULATION |
| | | | | | | | | | CHAIN: A, B, C, D; | FACTOR II; COAGULATION FACTOR II; |
| | | | | | | | | | THROMBIN HEAVY CHAIN; | FETOMODULIN, TM, CD141 ANTIGEN; |
| | | | | | | | | | CHAIN: M, N, O, P; | EGR-CMK SERINE PROTEINASE, EGF- |
| | | | | | | | | | THROMBOMODULIN; | LIKE DOMAINS, ANTICOAGULANT |
| | | | | | | | | | CHAIN: I, J, K, L; THROMBIN | COMPLEX, 2 ANTIFIBRINOLYTIC |
| | | | | | | | | | INHIBITOR L-GLU-L-GLY-L- | COMPLEX” |
| | | | | | | | | | ARM; CHAIN: E, F, G, H;” | |
| 315 | 1dx5 | I | 680 | 805 | 2.10E−24 | 0.15 | 0.57 | | “THROMBIN LIGHT CHAIN; | “SERINE PROTEINASE COAGULATION |
| | | | | | | | | | CHAIN: A, B, C, D; | FACTOR II; COAGULATION FACTOR II; |
| | | | | | | | | | THROMBIN HEAVY CHAIN; | FETOMODULIN, TM, CD141 ANTIGEN; |
| | | | | | | | | | CHAIN: M, N, O, P; | EGR-CMK SERINE PROTEINASE, EGF- |
| | | | | | | | | | THROMBOMODULIN; | LIKE DOMAINS, ANTICOAGULANT |
| | | | | | | | | | CHAIN: I, J, K, L; THROMBIN | COMPLEX, 2 ANTIFIBRINOLYTIC |
| | | | | | | | | | INHIBITOR L-GLU-L-GLY-L- | COMPLEX” |
| | | | | | | | | | ARM; CHAIN: E, F, G, H;” | |
| 315 | 1dx5 | I | 474 | 592 | 4.20E−23 | 0.06 | 0.33 | | “THROMBIN LIGHT CHAIN; | “SERINE PROTEINASE COAGULATION |
| | | | | | | | | | CHAIN: A, B, C, D; | FACTOR II; COAGULATION FACTOR II; |
| | | | | | | | | | THROMBIN HEAVY CHAIN; | FETOMODULIN, TM, CD141 ANTIGEN; |
| | | | | | | | | | CHAIN: M, N, O, P; | EGR-CMK SERINE PROTEINASE, EGF- |
| | | | | | | | | | THROMBOMODULIN; | LIKE DOMAINS, ANTICOAGULANT |
| | | | | | | | | | CHAIN: I, J, K, L; THROMBIN | COMPLEX, 2 ANTIFIBRINOLYTIC |
| | | | | | | | | | INHIBITOR L-GLU-L-GLY-L- | COMPLEX” |
| | | | | | | | | | ARM; CHAIN: E, F, G, H;” | |
| 315 | 1dx5 | I | 436 | 556 | 1.30E−19 | 0.29 | 0.33 | | “THROMBIN LIGHT CHAIN; | “SERINE PROTEINASE COAGULATION |
| | | | | | | | | | CHAIN: A, B, C, D; | FACTOR II; COAGULATION FACTOR II; |
| | | | | | | | | | THROMBIN HEAVY CHAIN; | FETOMODULIN, TM, CD141 ANTIGEN; |
| | | | | | | | | | CHAIN: M, N, O, P; | EGR-CMK SERINE PROTEINASE, EGF- |
| | | | | | | | | | THROMBOMODULIN; | LIKE DOMAINS, ANTICOAGULANT |
| | | | | | | | | | CHAIN: I, J, K, L; THROMBIN | COMPLEX, 2 ANTIFIBRINOLYTIC |
| | | | | | | | | | INHIBITOR L-GLU-L-GLY-L- | COMPLEX” |
| | | | | | | | | | ARM; CHAIN: E, F, G, H;” | |
| 315 | 1dx5 | I | 807 | 920 | 8.40E−18 | −0.01 | 0.05 | | “THROMBIN LIGHT CHAIN; | “SERINE PROTEINASE COAGULATION |
| | | | | | | | | | CHAIN: A, B, C, D; | FACTOR II; COAGULATION FACTOR II; |
| | | | | | | | | | THROMBIN HEAVY CHAIN; | FETOMODULIN, TM, CD141 ANTIGEN; |
| | | | | | | | | | CHAIN: M, N, O, P; | EGR-CMK SERINE PROTEINASE, EGF- |
| | | | | | | | | | THROMBOMODULIN; | LIKE DOMAINS, ANTICOAGULANT |
| | | | | | | | | | CHAIN: I, J, K, L; THROMBIN | COMPLEX, 2 ANTIFIBRINOLYTIC |
| | | | | | | | | | INHIBITOR L-GLU-L-GLY-L- | COMPLEX” |
| | | | | | | | | | ARM; CHAIN: E, F, G, H;” | |
| 315 | 1dx5 | I | 806 | 933 | 1.70E−16 | 0.02 | 0.55 | | “THROMBIN LIGHT CHAIN; | “SERINE PROTEINASE COAGULATION |
| | | | | | | | | | CHAIN: A, B, C, D; | FACTOR II; COAGULATION FACTOR II; |
| | | | | | | | | | THROMBIN HEAVY CHAIN; | FETOMODULIN, TM, CD141 ANTIGEN; |
| | | | | | | | | | CHAIN: M, N, O, P; | EGR-CMK SERINE PROTEINASE, EGF- |
| | | | | | | | | | THROMBOMODULIN; | LIKE DOMAINS, ANTICOAGULANT |
| | | | | | | | | | CHAIN: I, J, K, L; THROMBIN | COMPLEX, 2 ANTIFIBRINOLYTIC |
| | | | | | | | | | INHIBITOR L-GLU-L-GLY-L- | COMPLEX” |
| | | | | | | | | | ARM; CHAIN: E, F, G, H;” | |
| 315 | 1dx5 | I | 1022 | 1137 | 1.70E−15 | −0.37 | 0.15 | | “THROMBIN LIGHT CHAIN; | “SERINE PROTEINASE COAGULATION |
| | | | | | | | | | CHAIN: A, B, C, D; | FACTOR II; COAGULATION FACTOR II; |
| | | | | | | | | | THROMBIN HEAVY CHAIN; | FETOMODULIN, TM, CD141 ANTIGEN; |
| | | | | | | | | | CHAIN: M, N, O, P; | EGR-CMK SERINE PROTEINASE, EGF- |
| | | | | | | | | | THROMBOMODULIN; | LIKE DOMAINS, ANTICOAGULANT |
| | | | | | | | | | CHAIN: I, J, K, L; THROMBIN | COMPLEX, 2 ANTIFIBRINOLYTIC |
| | | | | | | | | | INHIBITOR L-GLU-L-GLY-L- | COMPLEX” |
| | | | | | | | | | ARM; CHAIN: E, F, G, H;” | |
| 315 | 1dx5 | I | 168 | 279 | 1.70E−14 | 0.21 | −0.13 | | “THROMBIN LIGHT CHAIN; | “SERINE PROTEINASE COAGULATION |
| | | | | | | | | | CHAIN: A, B, C, D; | FACTOR II; COAGULATION FACTOR II; |
| | | | | | | | | | THROMBIN HEAVY CHAIN; | FETOMODULIN, TM, CD141 ANTIGEN; |
| | | | | | | | | | CHAIN: M, N, O, P; | EGR-CMK SERINE PROTEINASE, EGF- |
| | | | | | | | | | THROMBOMODULIN; | LIKE DOMAINS, ANTICOAGULANT |
| | | | | | | | | | CHAIN: I, J, K, L; THROMBIN | COMPLEX, 2 ANTIFIBRINOLYTIC |
| | | | | | | | | | INHIBITOR L-GLU-L-GLY-L- | COMPLEX” |
| | | | | | | | | | ARM; CHAIN: E, F, G, H;” | |
| 315 | 1dx5 | I | 1319 | 1418 | 1.70E−13 | −0.1 | 0.71 | | “THROMBIN LIGHT CHAIN; | “SERINE PROTEINASE COAGULATION |
| | | | | | | | | | CHAIN: A, B, C, D; | FACTOR II; COAGULATION FACTOR II; |
| | | | | | | | | | THROMBIN HEAVY CHAIN; | FETOMODULIN, TM, CD141 ANTIGEN; |
| | | | | | | | | | CHAIN: M, N, O, P; | EGR-CMK SERINE PROTEINASE, EGF- |
| | | | | | | | | | THROMBOMODULIN; | LIKE DOMAINS, ANTICOAGULANT |
| | | | | | | | | | CHAIN: I, J, K, L; THROMBIN | COMPLEX, 2 ANTIFIBRINOLYTIC |
| | | | | | | | | | INHIBITOR L-GLU-L-GLY-L- | COMPLEX” |
| | | | | | | | | | ARM; CHAIN: E, F, G, H;” | |
| 315 | 1dx5 | I | 243 | 357 | 1.40E−12 | 0.23 | 0.22 | | “THROMBIN LIGHT CHAIN; | “SERINE PROTEINASE COAGULATION |
| | | | | | | | | | CHAIN: A, B, C, D; | FACTOR II; COAGULATION FACTOR II; |
| | | | | | | | | | THROMBIN HEAVY CHAIN; | FETOMODULIN, TM, CD141 ANTIGEN; |
| | | | | | | | | | CHAIN: M, N, O, P; | EGR-CMK SERINE PROTEINASE, EGF- |
| | | | | | | | | | THROMBOMODULIN; | LIKE DOMAINS, ANTICOAGULANT |
| | | | | | | | | | CHAIN: I, J, K, L; THROMBIN | COMPLEX, 2 ANTIFIBRINOLYTIC |
| | | | | | | | | | INHIBITOR L-GLU-L-GLY-L- | COMPLEX” |
| | | | | | | | | | ARM; CHAIN: E, F, G, H;” | |
| 315 | 1dx5 | I | 1298 | 1419 | 1.40E−10 | −0.17 | 0.23 | | “THROMBIN LIGHT CHAIN; | “SERINE PROTEINASE COAGULATION |
| | | | | | | | | | CHAIN: A, B, C, D; | FACTOR II; COAGULATION FACTOR II; |
| | | | | | | | | | THROMBIN HEAVY CHAIN; | FETOMODULIN, TM, CD141 ANTIGEN; |
| | | | | | | | | | CHAIN: M, N, O, P; | EGR-CMK SERINE PROTEINASE, EGF- |
| | | | | | | | | | THROMBOMODULIN; | LIKE DOMAINS, ANTICOAGULANT |
| | | | | | | | | | CHAIN: I, J, K, L; THROMBIN | COMPLEX, 2 ANTIFIBRINOLYTIC |
| | | | | | | | | | INHIBITOR L-GLU-L-GLY-L- | COMPLEX” |
| | | | | | | | | | ARM; CHAIN: E, F, G, H;” | |
| 315 | 1dx5 | I | 899 | 1018 | 5.10E−08 | 0.05 | −0.17 | | “THROMBIN LIGHT CHAIN; | “SERINE PROTEINASE COAGULATION |
| | | | | | | | | | CHAIN: A, B, C, D; | FACTOR II; COAGULATION FACTOR II; |
| | | | | | | | | | THROMBIN HEAVY CHAIN; | FETOMODULIN, TM, CD141 ANTIGEN; |
| | | | | | | | | | CHAIN: M, N, O, P; | EGR-CMK SERINE PROTEINASE, EGF- |
| | | | | | | | | | THROMBOMODULIN; | LIKE DOMAINS, ANTICOAGULANT |
| | | | | | | | | | CHAIN: I, J, K, L; THROMBIN | COMPLEX, 2 ANTIFIBRINOLYTIC |
| | | | | | | | | | INHIBITOR L-GLU-L-GLY-L- | COMPLEX” |
| | | | | | | | | | ARM; CHAIN: E, F, G, H;” | |
| 315 | 1emn | | 763 | 825 | 6.30E−19 | 0.12 | 1 | | FIBRILLIN; CHAIN: NULL; | “MATRIX PROTEIN EXTRACELLULAR |
| | | | | | | | | | | MATRIX, CALCIUM-BINDING, |
| | | | | | | | | | | GLYCOPROTEIN, 2 REPEAT, SIGNAL, |
| | | | | | | | | | | MULTIGENE FAMILY, DISEASE |
| | | | | | | | | | | MUTATION, 3 EGF-LIKE DOMAIN, |
| | | | | | | | | | | HUMAN FIBRILLIN-1 FRAGMENT, |
| | | | | | | | | | | MATRIX PROTEIN” |
| 315 | 1emn | | 207 | 278 | 1.00E−18 | 0.48 | 0.31 | | FIBRILLIN; CHAIN: NULL; | “MATRIX PROTEIN EXTRACELLULALR |
| | | | | | | | | | | MATRIX, CALCIUM-BINDING, |
| | | | | | | | | | | GLYCOPROTEIN, 2 REPEAT, SIGNAL, |
| | | | | | | | | | | MULTIGENE FAMILY, DISEASE |
| | | | | | | | | | | MUTATION, 3 EGF-LIKE DOMAIN, |
| | | | | | | | | | | HUMAN FIBRILLIN-1 FRAGMENT, |
| | | | | | | | | | | MATRIX PROTEIN” |
| 315 | 1emn | | 472 | 535 | 2.10E−17 | −0.01 | 0.99 | | FIBRILLIN; CHAIN: NULL; | “MATRIX PROTEIN EXTRACELLULAR |
| | | | | | | | | | | MATRIX, CALCIUM-BINDING, |
| | | | | | | | | | | GLYCOPROTEIN, 2 REPEAT, SIGNAL, |
| | | | | | | | | | | MULTIGENE FAMILY, DISEASE |
| | | | | | | | | | | MUTATION, 3 EGF-LIKE DOMAIN, |
| | | | | | | | | | | HUMAN FIBRILLIN-1 FRAGMENT, |
| | | | | | | | | | | MATRIX PROTEIN” |
| 315 | 1emn | | 432 | 509 | 1.70E−16 | 0.72 | 1 | | FIBRILLIN; CHAIN: NULL; | “MATRIX PROTEIN EXTRACELLULAR |
| | | | | | | | | | | MATRIX, CALCIUM-BINDING, |
| | | | | | | | | | | GLYCOPROTEIN, 2 REPEAT, SIGNAL, |
| | | | | | | | | | | MULTIGENE FAMILY, DISEASE |
| | | | | | | | | | | MUTATION, 3 EGF-LIKE DOMAIN, |
| | | | | | | | | | | HUMAN FIBRILLIN-1 FRAGMENT, |
| | | | | | | | | | | MATRIX PROTEIN” |
| 315 | 1emn | | 243 | 319 | 3.40E−16 | 0.25 | 0.76 | | FIBRILLIN; CHAIN: NULL; | “MATRIX PROTEIN EXTRACELLULAR |
| | | | | | | | | | | MATRIX, CALCIUM-BINDING, |
| | | | | | | | | | | GLYCOPROTEIN, 2 REPEAT, SIGNAL, |
| | | | | | | | | | | MULTIGENE FAMILY, DISEASE |
| | | | | | | | | | | MUTATION, 3 EGF-LIKE DOMAIN, |
| | | | | | | | | | | HUMAN FIBRILLIN-1 FRAGMENT, |
| | | | | | | | | | | MATRIX PROTEIN” |
| 315 | 1emn | | 1338 | 1417 | 6.80E−15 | −0.16 | 0.62 | | FIBRILLIN; CHAIN: NULL; | “MATRIX PROTEIN EXTRACELLULAR |
| | | | | | | | | | | MATRIX, CALCIUM-BINDING, |
| | | | | | | | | | | GLYCOPROTEIN, 2 REPEAT, SIGNAL, |
| | | | | | | | | | | MULTIGENE FAMILY, DISEASE |
| | | | | | | | | | | MUTATION, 3 EGF-LIKE DOMAIN, |
| | | | | | | | | | | HUMAN FIBRILLIN-1 FRAGMENT, |
| | | | | | | | | | | MATRIX PROTEIN” |
| 315 | 1emn | | 1054 | 1117 | 1.10E−14 | 0.26 | 0.99 | | FIBRILLIN; CHAIN: NULL; | “MATRIX PROTEIN EXTRACELLULAR |
| | | | | | | | | | | MATRIX, CALCIUM-BINDING, |
| | | | | | | | | | | GLYCOPROTEIN, 2 REPEAT, SIGNAL, |
| | | | | | | | | | | MULTIGENE FAMILY, DISEASE |
| | | | | | | | | | | MUTATION, 3 EGF-LIKE DOMAIN, |
| | | | | | | | | | | HUMAN FIBRILLIN-1 FRAGMENT, |
| | | | | | | | | | | MATRIX PROTEIN” |
| 315 | 1emn | | 1097 | 1177 | 1.20E−13 | 0.09 | 0.15 | | FIBRILLIN; CHAIN: NULL; | “MATRIX PROTEIN EXTRACELLULAR |
| | | | | | | | | | | MATRIX, CALCIUM-BINDING, |
| | | | | | | | | | | GLYCOPROTEIN, 2 REPEAT, SIGNAL, |
| | | | | | | | | | | MULTIGENE FAMILY, DISEASE |
| | | | | | | | | | | MUTATION, 3 EGF-LIKE DOMAIN, |
| | | | | | | | | | | HUMAN FIBRILLIN-1 FRAGMENT, |
| | | | | | | | | | | MATRIX PROTEIN” |
| 315 | 1emn | | 848 | 923 | 5.10E−13 | 0.1 | 0.92 | | FIBRILLIN; CHAIN: NULL; | “MATRIX PROTEIN EXTRACELLULAR |
| | | | | | | | | | | MATRIX, CALCIUM-BINDING, |
| | | | | | | | | | | GLYCOPROTEIN, 2 REPEAT, SIGNAL, |
| | | | | | | | | | | MULTIGENE FAMILY, DISEASE |
| | | | | | | | | | | MUTATION, 3 EGF-LIKE DOMAIN, |
| | | | | | | | | | | HUMAN FIBRILLIN-1 FRAGMENT, |
| | | | | | | | | | | MATRIX PROTEIN” |
| 315 | 1emn | | 322 | 391 | 3.40E−11 | 0.15 | −0.2 | | FIBRILLIN; CHAIN: NULL; | “MATRIX PROTEIN EXTRACELLULAR |
| | | | | | | | | | | MATRIX, CALCIUM-BINDING, |
| | | | | | | | | | | GLYCOPROTEIN, 2 REPEAT, SIGNAL, |
| | | | | | | | | | | MULTIGENE FAMILY, DISEASE |
| | | | | | | | | | | MUTATION, 3 EGF-LIKE DOMAIN, |
| | | | | | | | | | | HUMAN FIBRILLIN-1 FRAGMENT, |
| | | | | | | | | | | MATRIX PROTEIN” |
| 315 | 1esl | | 164 | 241 | 5.10E−10 | 0.02 | −0.17 | | | “CELL ADHESION PROTEIN E-SELECTIN |
| | | | | | | | | | | (LECTIN AND EGF DOMAINS, RESIDUES 1-157) |
| | | | | | | | | | | 1ESL 3 (FORMERLY KNOWN AS |
| | | | | | | | | | | ELAM-1) 1ESL 4” |
| 315 | 1ext | A | 176 | 283 | 1.50E−08 | 0.17 | −0.18 | | “TUMOR NECROSIS | “SIGNALLING PROTEIN BINDING |
| | | | | | | | | | FACTOR RECEPTOR; | PROTEIN, CYTOKINE, SIGNALLING |
| | | | | | | | | | CHAIN: A, B;” | PROTEIN” |
| 315 | 1ext | A | 1005 | 1139 | 1.90E−08 | 0.37 | −0.01 | | “TUMOR NECROSIS | “SIGNALLING PROTEIN BINDING |
| | | | | | | | | | FACTOR RECEPTOR; | PROTEIN, CYTOKINE, SIGNALLING |
| | | | | | | | | | CHAIN: A, B;” | PROTEIN” |
| 315 | 1fak | L | 552 | 650 | 8.40E−27 | 0.41 | 0.25 | | BLOOD COAGULATION | “BLOOD CLOTTING COMPLEX(SERINE |
| | | | | | | | | | FACTOR VIIA; CHAIN: L; | PROTEASE/COFACTOR/LIGAND), BLOOD |
| | | | | | | | | | BLOOD COAGULATION | COAGULATION, 2 SERINE PROTEASE, |
| | | | | | | | | | FACTOR VIIA; CHAIN: H; | COMPLEX, CO-FACTOR, RECEPTOR |
| | | | | | | | | | SOLUBLE TISSUE FACTOR; | ENZYME, 3 INHIBITOR, GLA, EGF, |
| | | | | | | | | | CHAIN: T; 5L15; CHAIN: I; | COMPLEX (SERINE 4 |
| | | | | | | | | | | PROTEASE/COFACTOR/LIGAND), BLOOD |
| | | | | | | | | | | CLOTTING” |
| 315 | 1fak | L | 594 | 698 | 1.00E−20 | 0.11 | 0 | | BLOOD COAGULATION | “BLOOD CLOTTING COMPLEX(SERINE |
| | | | | | | | | | FACTOR VIIA; CHAIN: L; | PROTEASE/COFACTOR/LIGAND), BLOOD |
| | | | | | | | | | BLOOD COAGULATION | COAGULATION, 2 SERINE PROTEASE, |
| | | | | | | | | | FACTOR VIIA; CHAIN: H; | COMPLEX, CO-FACTOR, RECEPTOR |
| | | | | | | | | | SOLUBLE TISSUE FACTOR; | ENZYME, 3 INHIBITOR, GLA, EGF, |
| | | | | | | | | | CHAIN: T; 5L15; CHAIN: I; | COMPLEX (SERINE 4 |
| | | | | | | | | | | PROTEASE/COFACTOR/LIGAND), BLOOD |
| | | | | | | | | | | CLOTTING” |
| 315 | 1fak | L | 763 | 867 | 4.20E−20 | 0.15 | 0.47 | | BLOOD COAGULATION | “BLOOD CLOTTING COMPLEX(SERINE |
| | | | | | | | | | FACTOR VIIA; CHAIN: L; | PROTEASE/COFACTOR/LIGAND), BLOOD |
| | | | | | | | | | BLOOD COAGULATION | COAGULATION, 2 SERINE PROTEASE, |
| | | | | | | | | | FACTOR VIIA; CHAIN: H; | COMPLEX, CO-FACTOR, RECEPTOR |
| | | | | | | | | | SOLUBLE TISSUE FACTOR; | ENZYME, 3 INHIBITOR, GLA, EGF, |
| | | | | | | | | | CHAIN: T; 5L15; CHAIN: I; | COMPLEX (SERINE 4 |
| | | | | | | | | | | PROTEASE/COFACTOR/LIGAND), BLOOD |
| | | | | | | | | | | CLOTTING” |
| 315 | 1fak | L | 1054 | 1148 | 4.20E−14 | 0.42 | 1 | | BLOOD COAGULATION | “BLOOD CLOTTING COMPLEX(SERINE |
| | | | | | | | | | FACTOR VIIA; CHAIN: L; | PROTEASE/COFACTOR/LIGAND), BLOOD |
| | | | | | | | | | BLOOD COAGULATION | COAGULATION, 2 SERINE PROTEASE, |
| | | | | | | | | | FACTOR VIIA; CHAIN: H; | COMPLEX, CO-FACTOR, RECEPTOR |
| | | | | | | | | | SOLUBLE TISSUE FACTOR; | ENZYME, 3 INHIBITOR, GLA, EGF, |
| | | | | | | | | | CHAIN: T; 5L15; CHAIN: I; | COMPLEX (SERINE 4 |
| | | | | | | | | | | PROTEASE/COFACTOR/LIGAND), BLOOD |
| | | | | | | | | | | CLOTTING” |
| 315 | 1fak | L | 207 | 292 | 3.40E−13 | 0.23 | −0.07 | | BLOOD COAGULATION | “BLOOD CLOTTING COMPLEX(SERINE |
| | | | | | | | | | FACTOR VIIA; CHAIN: L; | PROTEASE/COFACTOR/LIGAND), BLOOD |
| | | | | | | | | | BLOOD COAGULATION | COAGULATION, 2 SERINE PROTEASE, |
| | | | | | | | | | FACTOR VIIA; CHAIN: H; | COMPLEX, CO-FACTOR, RECEPTOR |
| | | | | | | | | | SOLUBLE TISSUE FACTOR; | ENZYME, 3 INHIBITOR, GLA, EGF, |
| | | | | | | | | | CHAIN: T; 5L15; CHAIN: I; | COMPLEX (SERINE 4 |
| | | | | | | | | | | PROTEASE/COFACTOR/LIGAND), BLOOD |
| | | | | | | | | | | CLOTTING” |
| 315 | 1fak | L | 1338 | 1423 | 5.10E−13 | −0.55 | 0.09 | | BLOOD COAGULATION | “BLOOD CLOTTING COMPLEX(SERINE |
| | | | | | | | | | FACTOR VIIA; CHAIN: L; | PROTEASE/COFACTOR/LIGAND), BLOOD |
| | | | | | | | | | BLOOD COAGULATION | COAGULATION, 2 SERINE PROTEASE, |
| | | | | | | | | | FACTOR VIIA; CHAIN: H; | COMPLEX, CO-FACTOR, RECEPTOR |
| | | | | | | | | | SOLUBLE TISSUE FACTOR; | ENZYME, 3 INHIBITOR, GLA, EGF, |
| | | | | | | | | | CHAIN: T; 5L15; CHAIN: I; | COMPLEX (SERINE 4 |
| | | | | | | | | | | PROTEASE/COFACTOR/LIGAND), BLOOD |
| | | | | | | | | | | CLOTTING” |
| 315 | 1fak | L | 244 | 329 | 5.10E−13 | −0.09 | 0.31 | | BLOOD COAGULATION | “BLOOD CLOTTING COMPLEX(SERINE |
| | | | | | | | | | FACTOR VIIA; CHAIN: L; | PROTEASE/COFACTOR/LIGAND), BLOOD |
| | | | | | | | | | BLOOD COAGULATION | COAGULATION, 2 SERINE PROTEASE, |
| | | | | | | | | | FACTOR VIIA; CHAIN: H; | COMPLEX, CO-FACTOR, RECEPTOR |
| | | | | | | | | | SOLUBLE TISSUE FACTOR; | ENZYME, 3 INHIBITOR, GLA, EGF, |
| | | | | | | | | | CHAIN: T; 5L15; CHAIN: I; | COMPLEX (SERINE 4 |
| | | | | | | | | | | PROTEASE/COFACTOR/LIGAND), BLOOD |
| | | | | | | | | | | CLOTTING” |
| 315 | 1fjs | L | 1338 | 1379 | 6.30E−09 | −0.14 | 0 | | COAGULATION FACTOR | “BLOOD CLOTTING PROTEIN INHIBITOR |
| | | | | | | | | | XA; CHAIN: A; | COMPLEX, COAGULATION COFACTOR, |
| | | | | | | | | | COAGULATION FACTOR | PROTEASE” |
| | | | | | | | | | XA; CHAIN: L; | |
| 315 | 1igr | A | 834 | 998 | 5.10E−09 | 0.13 | −0.19 | | INSULIN-LIKE GROWTH | “HORMONE RECEPTOR HORMONE |
| | | | | | | | | | FACTOR RECEPTOR 1; | RECEPTOR, INSULIN RECEPTOR FAMILY” |
| | | | | | | | | | CHAIN: A; | |
| 315 | 1jia | A | 485 | 601 | 1.90E−25 | 0.09 | −0.14 | | “PHOSPHOLIPASE A2; | “PHOSPHOLIPASE PHOSPHOLIPASE A2, |
| | | | | | | | | | CHAIN: A, B;” | AGKISTRODON HALYS PALLAS |
| | | | | | | | | | | CRYSTAL 2 STRUCTURE” |
| 315 | 1klo | | 556 | 738 | 6.30E−22 | 0.26 | −0.11 | | LAMININ; CHAIN: NULL; | GLYCOPROTEIN GLYCOPROTEIN |
| 315 | 1klo | | 649 | 811 | 1.00E−20 | 0.44 | −0.07 | | LAMININ; CHAIN: NULL; | GLYCOPROTEIN GLYCOPROTEIN |
| 315 | 1klo | | 731 | 903 | 1.90E−20 | 0.18 | −0.14 | | LAMININ; CHAIN: NULL; | GLYCOPROTEIN GLYCOPROTEIN |
| 315 | 1klo | | 157 | 296 | 3.40E−12 | 0.11 | −0.2 | | LAMININ; CHAIN: NULL; | GLYCOPROTEIN GLYCOPROTEIN |
| 315 | 1klo | | 900 | 1056 | 1.20E−09 | 0.03 | −0.2 | | LAMININ; CHAIN: NULL; | GLYCOPROTEIN GLYCOPROTEIN |
| 315 | 1klo | | 329 | 473 | 5.10E−09 | 0.07 | −0.19 | | LAMININ; CHAIN: NULL; | GLYCOPROTEIN GLYCOPROTEIN |
| 315 | 1klo | | 1311 | 1420 | 1.10E−08 | 0.06 | −0.15 | | LAMININ; CHAIN: NULL; | GLYCOPROTEIN GLYCOPROTEIN |
| 315 | 1ncf | A | 1005 | 112 | 1.10E−07 | 0.06 | 0.05 | | “TUMOR NECROSIS | “SIGNALLING PROTEIN TYPE I |
| | | | | 6 | | | | | FACTOR RECEPTOR; INCF 4 | RECEPTOR, STNFR1; 1NCF 8 BINDING |
| | | | | | | | | | CHAIN: A, B; INCF 5” | PROTEIN, CYTOKINE 1NCF 19” |
| 315 | 1pfx | L | 38 | 114 | 6.80E−12 | −0.36 | 0 | | “FACTOR IXA; CHAIN: C, L,; | “COMPLEX (BLOOD |
| | | | | | | | | | D-PHE-PRO-ARG; CHAIN: I;” | COAGULATION/INHIBITOR) CHRISTMAS |
| | | | | | | | | | | FACTOR; COMPLEX, INHIBITOR, |
| | | | | | | | | | | HEMOPHILIA/EGF, BLOOD |
| | | | | | | | | | | COAGULATION, 2 PLASMA, SERINE |
| | | | | | | | | | | PROTEASE, CALCIUM-BINDING, |
| | | | | | | | | | | HYDROLASE, 3 GLYCOPROTEIN” |
| 315 | 1pfx | L | 241 | 320 | 6.80E−10 | 0.15 | 0.13 | | “FACTOR IXA; CHAIN: C, L,; | “COMPLEX (BLOOD |
| | | | | | | | | | D-PHE-PRO-ARG; CHAIN: I;” | COAGULATION/INHIBITOR) CHRISTMAS |
| | | | | | | | | | | FACTOR; COMPLEX, INHIBITOR, |
| | | | | | | | | | | HEMOPHILIA/EGF, BLOOD |
| | | | | | | | | | | COAGULATION, 2 PLASMA, SERINE |
| | | | | | | | | | | PROTEASE, CALCIUM-BINDING, |
| | | | | | | | | | | HYDROLASE, 3 GLYCOPROTEIN” |
| 315 | 1pp2 | R | 682 | 811 | 1.50E−26 | 0.39 | −0.11 | | | HYDROLASE CALCIUM-FREE |
| | | | | | | | | | | PHOSPHOLIPASE A = 2 = (E.C.3.1.1.4) 1PP2 4 |
| 315 | 1qfk | L | 600 | 691 | 1.30E−21 | 0.18 | 0.65 | | COAGULATION FACTOR | “SERINE PROTEASE FVIIA; FVIIA; BLOOD |
| | | | | | | | | | VIIA (LIGHT CHAIN); | COAGULATION, SERINE PROTEASE” |
| | | | | | | | | | CHAIN: L; COAGULATION | |
| | | | | | | | | | FACTOR VIIA (HEAVY | |
| | | | | | | | | | CHAIN); CHAIN: H; | |
| | | | | | | | | | TRIPEPTIDYL INHIBITOR; | |
| | | | | | | | | | CHAIN: C; | |
| 315 | 1qfk | L | 768 | 860 | 4.20E−20 | 0.04 | 0.4 | | COAGULATION FACTOR | “SERINE PROTEASE FVIIA; FVIIA; BLOOD |
| | | | | | | | | | VIIA (LIGHT CHAIN); | COAGULATION, SERINE PROTEASE” |
| | | | | | | | | | CHAIN: L, COAGULATION | |
| | | | | | | | | | FACTOR VIIA (HEAVY | |
| | | | | | | | | | CHAIN); CHAIN: H; | |
| | | | | | | | | | TRIPEPTIDYL INHIBITOR; | |
| | | | | | | | | | CHAIN: C; | |
| 315 | 1qfk | L | 436 | 543 | 8.40E−19 | 0.03 | 0.15 | | COAGULATION FACTOR | “SERINE PROTEASE FVIIA; FVIIA; BLOOD |
| | | | | | | | | | VIIA (LIGHT CHAIN); | COAGULATION, SERINE PROTEASE” |
| | | | | | | | | | CHAIN: L; COAGULATION | |
| | | | | | | | | | FACTOR VIIA (HEAVY | |
| | | | | | | | | | CHAIN); CHAIN: H; | |
| | | | | | | | | | TRIPEPTIDYL INHIBITOR; | |
| | | | | | | | | | CHAIN: C; | |
| 315 | 1qfk | L | 1337 | 1420 | 1.10E−14 | −0.48 | 0.03 | | COAGULATION FACTOR | “SERINE PROTEASE FVIIA; FVIIA; BLOOD |
| | | | | | | | | | VIIA (LIGHT CHAIN); | COAGULATION, SERINE PROTEASE” |
| | | | | | | | | | CHAIN: L; COAGULATION | |
| | | | | | | | | | FACTOR VIIA (HEAVY | |
| | | | | | | | | | CHAIN); CHAIN: H; | |
| | | | | | | | | | TRIPEPTIDYL INHIBITOR; | |
| | | | | | | | | | CHAIN: C; | |
| 315 | 1qfk | L | 1057 | 1152 | 4.20E−14 | −0.02 | 0.95 | | COAGULATION FACTOR | “SERINE PROTEASE FVIIA; FVIIA; BLOOD |
| | | | | | | | | | VIIA (LIGHT CHAIN); | COAGULATION, SERINE PROTEASE” |
| | | | | | | | | | CHAIN: L; COAGULATION | |
| | | | | | | | | | FACTOR VIIA (HEAVY | |
| | | | | | | | | | CHAIN); CHAIN: H; | |
| | | | | | | | | | TRIPEPTIDYL INHIBITOR; | |
| | | | | | | | | | CHAIN: C; | |
| 315 | 1qfk | L | 1338 | 1423 | 5.10E−13 | −0.17 | 0.55 | | COAGULATION FACTOR | “SERINE PROTEASE FVIIA; FVIIA; BLOOD |
| | | | | | | | | | VIIA (LIGHT CHAIN); | COAGULATION, SERINE PROTEASE” |
| | | | | | | | | | CHAIN: L; COAGULATION | |
| | | | | | | | | | FACTOR VIIA (HEAVY | |
| | | | | | | | | | CHAIN); CHAIN: H; | |
| | | | | | | | | | TRIPEPTIDYL INHIBITOR; | |
| | | | | | | | | | CHAIN: C; | |
| 315 | 1qfk | L | 248 | 329 | 6.80E−12 | −0.12 | 0.29 | | COAGULATION FACTOR | “SERINE PROTEASE FVIIA; FVIIA; BLOOD |
| | | | | | | | | | VIIA (LIGHT CHAIN); | COAGULATION, SERINE PROTEASE” |
| | | | | | | | | | CHAIN: L; COAGULATION | |
| | | | | | | | | | FACTOR VIIA (HEAVY | |
| | | | | | | | | | CHAIN); CHAIN: H; | |
| | | | | | | | | | TRIPEPTIDYL INHIBITOR; | |
| | | | | | | | | | CHAIN: C; | |
| 315 | 1tpg | | 619 | 727 | 1.50E−21 | 0.3 | 0.11 | | T-PLASMINOGEN | PLASMINOGEN ACTIVATION |
| | | | | | | | | | ACTIVATOR F1-G; 1TPG 7 | |
| | | | | | | | | | CHAIN: NULL; 1TPG 8 | |
| 315 | 1tpg | | 455 | 562 | 2.10E−19 | −0.18 | 0.16 | | T-PLASMINOGEN | PLASMINOGEN ACTIVATION |
| | | | | | | | | | ACTIVATOR F1-G; 1TPG 7 | |
| | | | | | | | | | CHAIN: NULL; 1TPG 8 | |
| 315 | 1vap | A | 485 | 601 | 4.20E−31 | 0.15 | −0.09 | | “PHOSPHOLIPASE A2; | “LIPID DEGRADATION PHOSPHOLIPASE |
| | | | | | | | | | CHAIN: A, B;” | A2, LIPID DEGRADATION, HYDROLASE” |
| 315 | 1vap | A | 569 | 685 | 2.10E−26 | 0.09 | −0.14 | | “PHOSPHOLIPASE A2; | “LIPID DEGRADATION PHOSPHOLIPASE |
| | | | | | | | | | CHAIN: A, B;” | A2, LIPID DEGRADATION, HYDROLASE” |
| 315 | 1vap | A | 732 | 852 | 2.10E−23 | 0 | −0.19 | | “PHOSPHOLIPASE A2; | “LIPID DEGRADATION PHOSPHOLIPASE |
| | | | | | | | | | CHAIN: A, B;” | A2, LIPID DEGRADATION, HYDROLASE” |
| 315 | 1vap | A | 653 | 769 | 1.30E−21 | 0.18 | −0.18 | | “PHOSPHOLIPASE A2; | “LIPID DEGRADATION PHOSPHOLIPASE |
| | | | | | | | | | CHAIN: A, B;” | A2, LIPID DEGRADATION, HYDROLASE” |
| 315 | 1vap | A | 692 | 811 | 2.10E−21 | 0.25 | −0.14 | | “PHOSPHOLIPASE A2; | “LIPID DEGRADATION PHOSPHOLIPASE |
| | | | | | | | | | CHAIN: A, B;” | A2, LIPID DEGRADATION, HYDROLASE” |
| 315 | 1vpi | | 685 | 811 | 2.10E−24 | 0.31 | −0.15 | | PHOSPHOLIPASE A2 | “NEUROTOXIN PHOSPHOLIPASE A2 |
| | | | | | | | | | INHIBITOR; CHAIN: NULL | INHIBITOR, X-RAY STRUCTURE, |
| | | | | | | | | | | RECOGNITION, 2 MOLECULAR |
| | | | | | | | | | | EVOLUTION, NEUROTOXIN” |
| 315 | 1xka | L | 208 | 295 | 1.70E−13 | 0.03 | −0.03 | | “BLOOD COAGULATION | “BLOOD COAGULATION FACTOR |
| | | | | | | | | | FACTOR XA; CHAIN: L, C;” | STUART FACTOR; BLOOD |
| | | | | | | | | | | COAGULATION FACTOR, SERINE |
| | | | | | | | | | | PROTEINASE, EPIDERMAL 2 GROWTH |
| | | | | | | | | | | FACTOR LIKE DOMAIN” |
| 315 | 1xka | L | 248 | 322 | 1.50E−09 | 0.02 | −0.07 | | “BLOOD COAGULATION | “BLOOD COAGULATION FACTOR |
| | | | | | | | | | FACTOR XA; CHAIN: L, C;” | STUART FACTOR; BLOOD |
| | | | | | | | | | | COAGULATION FACTOR, SERINE |
| | | | | | | | | | | PROTEINASE, EPIDERMAL 2 GROWTH |
| | | | | | | | | | | FACTOR LIKE DOMAIN” |
| 315 | 2not | A | 808 | 921 | 2.10E−12 | 0.07 | −0.13 | | “PHOSPHOLIPASE A2; | “HYDROLASE HYDROLASE, LIPID |
| | | | | | | | | | CHAIN: A, B;” | DEGRADATION, CALCIUM, |
| | | | | | | | | | | PRESYNAPTIC 2 NEUROTOXIN, VENOM” |
| 315 | 9wga | A | 70 | 268 | 1.70E−12 | 0.02 | −0.19 | | | LECTIN (AGGLUTININ) WHEAT GERM |
| | | | | | | | | | | AGGLUTININ (ISOLECTIN 2) 9WGA 3 |
| 315 | 9wga | A | 286 | 468 | 5.10E−11 | 0.15 | −0.2 | | | LECTIN (AGGLUTININ) WHEAT GERM |
| | | | | | | | | | | AGGLUTININ (ISOLECTIN 2) 9WGA 3 |
| 317 | 1ihb | A | 72 | 223 | 1.10E−33 | | | 74.13 | “CYCLIN-DEPENDENT | “CELL CYCLE INHIBITOR P18- |
| | | | | | | | | | KINASE 6 INHIBITOR; | INK4C(INK6); CELL CYCLE INHIBITOR, |
| | | | | | | | | | CHAIN: A, B;” | P18-INK4C(INK6), ANKYRIN REPEAT, 2 |
| | | | | | | | | | | CDK 4/6 INHIBITOR” |
| 317 | 1ikn | D | 103 | 337 | 4.80E−39 | | | 74.28 | NF-KAPPA-B P65 SUBUNIT; | “TRANSCRIPTION FACTOR P65; P50D; |
| | | | | | | | | | CHAIN: A; NF-KAPPA-B | TRANSCRIPTION FACTOR, IKB/NFKB |
| | | | | | | | | | P50D SUBUNIT; CHAIN: C; I- | COMPLEX” |
| | | | | | | | | | KAPPA-B-ALPHA; CHAIN: D; | |
| 317 | 1nfi | E | 100 | 326 | 3.20E−39 | | | 79.82 | “NF-KAPPA-B P65; CHAIN: | “COMPLEX (TRANSCRIPTION REG/ANK |
| | | | | | | | | | A, C; NF-KAPPA-B P50; | REPEAT) COMPLEX (TRANSCRIPTION |
| | | | | | | | | | CHAIN: B, D; I-KAPPA-B- | REGULATION/ANK REPEAT), ANKYRIN 2 |
| | | | | | | | | | ALPHA; CHAIN: E, F;” | REPEAT HELIX” |
| 317 | 1ycs | B | 71 | 276 | 4.80E−25 | | | 86.29 | P53; CHAIN: A; 53BP2; | “COMPLEX (ANTI-ONCOGENE/ANKYRIN |
| | | | | | | | | | CHAIN: B; | REPEATS) P53BP2; ANKYRIN REPEATS, |
| | | | | | | | | | | SH3, P53, TUMOR SUPPRESSOR, |
| | | | | | | | | | | MULTIGENE 2 FAMILY, NUCLEAR |
| | | | | | | | | | | PROTEIN, PHOSPHORYLATION, DISEASE |
| | | | | | | | | | | MUTATION, 3 POLYMORPHISM, |
| | | | | | | | | | | COMPLEX (ANTI-ONCOGENE/ANKYRIN |
| | | | | | | | | | | REPEATS)” |
| 319 | 1got | B | 360 | 691 | 1.30E−67 | | | 82.31 | GT-ALPHA/GI-ALPHA | “COMPLEX (GTP-BINDING/TRANSDUCER) |
| | | | | | | | | | CHIMERA; CHAIN: A; GT- | BETA1, TRANSDUCIN BETA SUBUNIT; |
| | | | | | | | | | BETA; CHAIN: B; GT- | GAMMA1, TRANSDUCIN GAMMA |
| | | | | | | | | | GAMMA; CHAIN: G; | SUBUNIT; COMPLEX (GTP- |
| | | | | | | | | | | BINDING/TRANSDUCER), G PROTEIN, |
| | | | | | | | | | | HETEROTRIMER 2 SIGNAL |
| | | | | | | | | | | TRANSDUCTION” |
| 324 | 1ilb | | 27 | 172 | 3.20E−52 | | | 68.78 | | CYTOKINE INTERLEUKIN-1*BETA (/IL$- |
| | | | | | | | | | | 1*BETA) 1I1B4 |
| 324 | 1ilt | A | 28 | 172 | 1.30E−48 | | | 111.09 | | CYTOKINE INTERLEUKIN-1 RECEPTOR |
| | | | | | | | | | | ANTAGONIST (IL-1RA) (ALPHA |
| | | | | | | | | | | CARBONS) 1ILT 3 |
| 324 | 1irp | | 18 | 172 | 3.20E−50 | | | 113.23 | | “CYTOKINE INTERLEUKIN-1 RECEPTOR |
| | | | | | | | | | | ANTAGONIST PROTEIN 1IRP 3 (NMR, 12 |
| | | | | | | | | | | STRUCTURES) 1IRP 4” |
| 324 | 8ilb | | 29 | 172 | 4.80E−49 | | | 75.29 | | CYTOKINE INTERLEUKIN 1-*BETA 8I1B 3 |
| 325 | 1a5e | | 64 | 178 | 9.60E−25 | 0.45 | 1 | | TUMOR SUPPRESSOR | “ANTI-ONCOGENE CELL CYCLE, ANTI- |
| | | | | | | | | | P16INK4A; CHAIN: NULL; | ONCOGENE, REPEAT, ANK REPEAT” |
| 325 | 1awc | B | 30 | 178 | 1.40E−42 | 0.56 | 1 | | “GA BINDING PROTEIN | “COMPLEX (TRANSCRIPTION- |
| | | | | | | | | | ALPHA; CHAIN: A; GA | REGULATION/DNA) GABPALPHA; |
| | | | | | | | | | BINDING PROTEIN BETA 1; | GABPBETA1; COMPLEX (TRANSCRIPTION |
| | | | | | | | | | CHAIN: B; DNA; CHAIN: D, | REGULATION/DNA), DNA-BINDING, 2 |
| | | | | | | | | | E;” | NUCLEAR PROTEIN, ETS DOMAIN, |
| | | | | | | | | | | ANKYRIN REPEATS, TRANSCRIPTION 3 |
| | | | | | | | | | | FACTOR” |
| 325 | 1awc | B | 64 | 195 | 4.80E−37 | 0.56 | 1 | | “GA BINDING PROTEIN | “COMPLEX (TRANSCRIPTION |
| | | | | | | | | | ALPHA; CHAIN: A; GA | REGULATION/DNA) GABPALPHA; |
| | | | | | | | | | BINDING PROTEIN BETA 1; | GABPBETA1; COMPLEX (TRANSCRIPTION |
| | | | | | | | | | CHAIN: B; DNA; CHAIN: D, | REGULATION/DNA), DNA-BINDING, 2 |
| | | | | | | | | | E;” | NUCLEAR PROTEIN, ETS DOMAIN, |
| | | | | | | | | | | ANKYRIN REPEATS, TRANSCRIPTION 3 |
| | | | | | | | | | | FACTOR” |
| 325 | 1awc | B | 3 | 145 | 1.60E−34 | 0.39 | 1 | | “GA BINDING PROTEIN | “COMPLEX (TRANSCRIPTION |
| | | | | | | | | | ALPHA; CHAIN: A; GA | REGULATION/DNA) GABPALPHA; |
| | | | | | | | | | BINDING PROTEIN BETA 1; | GABPBETA1; COMPLEX (TRANSCRIPTION |
| | | | | | | | | | CHAIN: B; DNA; CHAIN: D, | REGULATION/DNA), DNA-BINDING, 2 |
| | | | | | | | | | E;” | NUCLEAR PROTEIN, ETS DOMAIN, |
| | | | | | | | | | | ANKYRIN REPEATS, TRANSCRIPTION 3 |
| | | | | | | | | | | FACTOR” |
| 325 | 1awc | B | 26 | 179 | 1.40E−42 | | | 61.33 | “GA BINDING PROTEIN | “COMPLEX (TRANSCRIPTION |
| | | | | | | | | | ALPHA; CHAIN: A; GA | REGULATION/DNA) GABPALPHA; |
| | | | | | | | | | BINDING PROTEIN BETA 1; | GABPBETA1; COMPLEX (TRANSCRIPTION |
| | | | | | | | | | CHAIN: B; DNA; CHAIN: D, | REGULATION/DNA), DNA-BINDING, 2 |
| | | | | | | | | | E;” | NUCLEAR PROTEIN, ETS DOMAIN, |
| | | | | | | | | | | ANKYRIN REPEATS, TRANSCRIPTION 3 |
| | | | | | | | | | | FACTOR” |
| 325 | 1bd8 | | 28 | 181 | 9.60E−33 | | | 57.12 | P19INK4D CDK4/6 | “TUMOR SUPPRESSOR TUMOR |
| | | | | | | | | | INHIBITOR; CHAIN: NULL; | SUPPRESSOR, CDK4/6 INHIBITOR, |
| | | | | | | | | | | ANKYRIN MOTIF” |
| 325 | 1bi7 | B | 64 | 178 | 8.00E−26 | 0.4 | 1 | | CYCLIN-DEPENDENT | “COMPLEX (KINASE/ANTI-ONCOGENE) |
| | | | | | | | | | KINASE 6; CHAIN: A; | CDK6; P16INK4A, MTS1; CYCLIN |
| | | | | | | | | | MULTIPLE TUMOR | DEPENDENT KINASE, CYCLIN |
| | | | | | | | | | SUPPRESSOR; CHAIN: B; | DEPENDENT KINASE INHIBITORY 2 |
| | | | | | | | | | | PROTEIN, CDK, INK4, CELL CYCLE, |
| | | | | | | | | | | MULTIPLE TUMOR SUPPRESSOR, 3 MTS1, |
| | | | | | | | | | | COMPLEX (KINASE/ANTI-ONCOGENE) |
| | | | | | | | | | | HEADER” |
| 325 | 1blx | B | 30 | 182 | 9.80E−36 | 0.57 | 1 | | CYCLIN-DEPENDENT | “COMPLEX (INHIBITOR |
| | | | | | | | | | KINASE 6; CHAIN: A; | PROTEIN/KINASE) INHIBITOR PROTEIN, |
| | | | | | | | | | P19INK4D; CHAIN: B; | CYCLIN-DEPENDENT KINASE, CELL |
| | | | | | | | | | | CYCLE 2 CONTROL, ALPHA/BETA, |
| | | | | | | | | | | COMPLEX (INHIBITOR |
| | | | | | | | | | | PROTEIN/KINASE)” |
| 325 | 1blx | B | 62 | 195 | 4.20E−31 | 0.49 | 1 | | CYCLIN-DEPENDENT | “COMPLEX (INHIBITOR |
| | | | | | | | | | KINASE 6; CHAIN: A; | PROTEIN/KINASE) INHIBITOR PROTEIN, |
| | | | | | | | | | P19INK4D; CHAIN: B; | CYCLIN-DEPENDENT KINASE, CELL |
| | | | | | | | | | | CYCLE 2 CONTROL, ALPHA/BETA, |
| | | | | | | | | | | COMPLEX (INHIBITOR |
| | | | | | | | | | | PROTEIN/KINASE)” |
| 325 | 1blx | B | 1 | 152 | 9.80E−36 | | | 54.31 | CYCLIN-DEPENDENT | “COMPLEX (INHIBITOR |
| | | | | | | | | | KINASE 6; CHAIN: A; | PROTEIN/KINASE) INHIBITOR PROTEIN, |
| | | | | | | | | | P19INK4D; CHAIN: B; | CYCLIN-DEPENDENT KINASE, CELL |
| | | | | | | | | | | CYCLE 2 CONTROL, ALPHA/BETA, |
| | | | | | | | | | | COMPLEX (INHIBITOR |
| | | | | | | | | | | PROTEIN/KINASE)” |
| 325 | 1bu9 | A | 30 | 183 | 4.80E−37 | 0.65 | 1 | | CYCLIN-DEPENDENT | “HORMONE/GROWTH FACTOR P18- |
| | | | | | | | | | KINASE 6 INHIBITOR; | INK4C; CELL CYCLE INHIBITOR, |
| | | | | | | | | | CHAIN: A; | P18INK4C, TUMOR, SUPPRESSOR, |
| | | | | | | | | | | CYCLIN-2 DEPENDENT KINASE, |
| | | | | | | | | | | HORMONE/GROWTH FACTOR” |
| 325 | 1bu9 | A | 64 | 195 | 6.40E−33 | 0.35 | 1 | | CYCLIN-DEPENDENT | “HORMONE/GROWTH FACTOR P18- |
| | | | | | | | | | KINASE 6 INHIBITOR; | INK4C; CELL CYCLE INHIBITOR, |
| | | | | | | | | | CHAIN: A; | P18INK4C, TUMOR, SUPPRESSOR, |
| | | | | | | | | | | CYCLIN-2 DEPENDENT KINASE, |
| | | | | | | | | | | HORMONE/GROWTH FACTOR” |
| 325 | 1bu9 | A | 25 | 189 | 4.80E−37 | | | 59.82 | CYCLIN-DEPENDENT | “HORMONE/GROWTH FACTOR P18- |
| | | | | | | | | | KINASE 6 INHIBITOR; | INK4C; CELL CYCLE INHIBITOR, |
| | | | | | | | | | CHAIN: A; | P18INK4C, TUMOR, SUPPRESSOR, |
| | | | | | | | | | | CYCLIN-2 DEPENDENT KINASE, |
| | | | | | | | | | | HORMONE/GROWTH FACTOR” |
| 325 | 1d9s | A | 83 | 195 | 7.00E−27 | 0.41 | 1 | | CYCLIN-DEPENDENT | “SIGNALING PROTEIN HELIX-TURN- |
| | | | | | | | | | KINASE 4 INHIBITOR B; | HELIX, ANKYRIN REPEAT” |
| | | | | | | | | | CHAIN: A; | |
| 325 | 1d9s | A | 64 | 184 | 4.80E−26 | 0.24 | 1 | | CYCLIN-DEPENDENT | “SIGNALING PROTEIN HELIX-TURN- |
| | | | | | | | | | KINASE 4 INHIBITOR B; | HELIX, ANKYRIN REPEAT” |
| | | | | | | | | | CHAIN: A; | |
| 325 | 1ihb | A | 30 | 182 | 1.60E−36 | 0.72 | 1 | | “CYCLIN-DEPENDENT | “CELL CYCLE INHIBITOR P18- |
| | | | | | | | | | KINASE 6 INHIBITOR; | INK4C(INK6); CELL CYCLE INHIBITOR, |
| | | | | | | | | | CHAIN: A, B;” | P18-INK4C(INK6), ANKYRIN REPEAT, 2 |
| | | | | | | | | | | CDK 4/6 INHIBITOR” |
| 325 | 1ihb | A | 64 | 195 | 6.40E−33 | 0.45 | 1 | | “CYCLIN-DEPENDENT | “CELL CYCLE INHIBITOR P18- |
| | | | | | | | | | KINASE 6 INHIBITOR; | INK4C(INK6); CELL CYCLE INHIBITOR, |
| | | | | | | | | | CHAIN: A, B;” | P18-INK4C(INK6), ANKYRIN REPEAT, 2 |
| | | | | | | | | | | CDK 4/6 INHIBITOR” |
| 325 | 1ihb | A | 27 | 182 | 1.60E−36 | | | 63.67 | “CYCLIN-DEPENDENT | “CELL CYCLE INHIBITOR P18- |
| | | | | | | | | | KINASE 6 INHIBITOR; | INK4C(INK6); CELL CYCLE INHIBITOR, |
| | | | | | | | | | CHAIN: A, B;” | P18-INK4C(INK6), ANKYRIN REPEAT, 2 |
| | | | | | | | | | | CDK 4/6 INHIBITOR” |
| 325 | 1ikn | D | 25 | 195 | 1.60E−41 | 0.31 | 1 | | NF-KAPPA-B P65 SUBUNIT; | “TRANSCRIPTION FACTOR P65; P50D; |
| | | | | | | | | | CHAIN: A; NF-KAPPA-B | TRANSCRIPTION FACTOR, IKB/NFKB |
| | | | | | | | | | P50D SUBUNIT; CHAIN: C; I- | COMPLEX” |
| | | | | | | | | | KAPPA-B-ALPHA; CHAIN: D; | |
| 325 | 1ikn | D | 17 | 162 | 4.80E−36 | 0.4 | 1 | | NF-KAPPA-B P65 SUBUNIT; | “TRANSCRIPTION FACTOR P65; P50D; |
| | | | | | | | | | CHAIN: A; NF-KAPPA-B | TRANSCRIPTION FACTOR, IKB/NFKB |
| | | | | | | | | | P50D SUBUNIT; CHAIN: C; I- | COMPLEX” |
| | | | | | | | | | KAPPA-B-ALPHA; CHAIN: D; | |
| 325 | 1ikn | D | 2 | 193 | 1.60E−41 | | | 54.26 | NF-KAPPA-B P65 SUBUNIT; | “TRANSCRIPTION FACTOR P65; P50D; |
| | | | | | | | | | CHAIN: A; NF-KAPPA-B | TRANSCRIPTION FACTOR, IKB/NFKB |
| | | | | | | | | | P50D SUBUNIT; CHAIN: C; I- | COMPLEX” |
| | | | | | | | | | KAPPA-B-ALPHA; CHAIN: D; | |
| 325 | 1myo | | 65 | 180 | 8.00E−26 | 0.13 | 0.71 | | MYOTROPHIN; CHAIN: | “ANK-REPEAT MYOTROPHIN, |
| | | | | | | | | | NULL | ACETYLATION, NMR, ANK-REPEAT” |
| 325 | 1myo | | 95 | 195 | 1.10E−25 | 0.36 | 1 | | MYOTROPHIN; CHAIN: | “ANK-REPEAT MYOTROPHIN, |
| | | | | | | | | | NULL | ACETYLATION, NMR, ANK-REPEAT” |
| 325 | 1myo | | 98 | 196 | 3.20E−24 | 0.14 | 1 | | MYOTROPHIN; CHAIN: | “ANK-REPEAT MYOTROPHIN, |
| | | | | | | | | | NULL | ACETYLATION, NMR, ANK-REPEAT” |
| 325 | 1myo | | 27 | 143 | 1.40E−31 | | | 61.01 | MYOTROPHIN; CHAIN: | “ANK-REPEAT MYOTROPHIN, |
| | | | | | | | | | NULL | ACETYLATION, NMR, ANK-REPEAT” |
| 325 | 1nfi | E | 24 | 195 | 1.30E−41 | 0.41 | 1 | | “NF-KAPPA-B P65; CHAIN: | “COMPLEX (TRANSCRIPTION REG/ANK |
| | | | | | | | | | A, C; NF-KAPPA-B P50; | REPEAT) COMPLEX (TRANSCRIPTION |
| | | | | | | | | | CHAIN: B, D; I-KAPPA-B- | REGULATION/ANK REPEAT), ANKYRIN 2 |
| | | | | | | | | | ALPHA; CHAIN: E, F;” | REPEAT HELIX” |
| 325 | 1ycs | B | 62 | 192 | 4.20E−30 | 0.4 | 0.98 | | P53; CHAIN: A; 53BP2; | “COMPLEX (ANTI-ONCOGENE/ANKYRIN |
| | | | | | | | | | CHAIN: B; | REPEATS) P53BP2; ANKYRIN REPEATS, |
| | | | | | | | | | | SH3, P53, TUMOR SUPPRESSOR, |
| | | | | | | | | | | MULTIGENE 2 FAMILY, NUCLEAR |
| | | | | | | | | | | PROTEIN, PHOSPHORYLATION, DISEASE |
| | | | | | | | | | | MUTATION, 3 POLYMORPHISM, |
| | | | | | | | | | | COMPLEX (ANTI-ONCOGENE/ANKYRIN |
| | | | | | | | | | | REPEATS)” |
| 326 | 1apm | E | 76 | 302 | 6.40E−81 | | | 86.74 | | “TRANSFERASE(PHOSPHOTRANSFERASE) |
| | | | | | | | | | | $C-/AMP$-DEPENDENT PROTEIN |
| | | | | | | | | | | KINASE (E.C.2.7.1.37) ($C/APK$) 1APM 3 |
| | | | | | | | | | | (CATALYTIC SUBUNIT) ““ALPHA”” |
| | | | | | | | | | | ISOENZYME MUTANT WITH SER 139 |
| | | | | | | | | | | 1APM 4 REPLACED BY ALA (/S139A$) |
| | | | | | | | | | | COMPLEX WITH THE PEPTIDE 1APM 5 |
| | | | | | | | | | | INHIBITOR PKI(5-24) AND THE |
| | | | | | | | | | | DETERGENT MEGA-8 1APM 6” |
| 326 | 1cmk | E | 60 | 302 | 3.20E−82 | | | 88.65 | | PHOSPHOTRANSFERASE CAMP- |
| | | | | | | | | | | DEPENDENT PROTEIN KINASE |
| | | | | | | | | | | CATALYTIC SUBUNIT 1CMK 3 |
| | | | | | | | | | | (E.C.2.7.1.37) 1CMK 4 |
| 326 | 1ctp | E | 77 | 302 | 3.20E−82 | | | 95.33 | | TRANSFERASE(PHOSPHOTRANSFERASE) |
| | | | | | | | | | | CAMP-DEPENDENT PROTEIN KINASE |
| | | | | | | | | | | (E.C.2.7.1.37) (CAPK) 1CTP 3 (CATALYTIC |
| | | | | | | | | | | SUBUNIT) 1CTP 4 |
| 326 | 1phk | | 104 | 302 | 1.60E−57 | | | 71.37 | PHOSPHORYLASE KINASE; | “KINASE RABBIT MUSCLE |
| | | | | | | | | | CHAIN: NULL; | PHOSPHORYLASE KINASE; GLYCOGEN |
| | | | | | | | | | | METABOLISM, TRANSFERASE, |
| | | | | | | | | | | SERINE/THREONINE-PROTEIN, 2 KINASE, |
| | | | | | | | | | | ATP-BINDING, CALMODULIN-BINDING” |
| 327 | 1erj | A | 118 | 435 | 3.20E−65 | 0.15 | 0.95 | | “TRANSCRIPTIONAL | TRANSCRIPTION INHIBITOR BETA- |
| | | | | | | | | | REPRESSOR TUP1; CHAIN: | PROPELLER |
| | | | | | | | | | A, B, C;” | |
| 327 | 1erj | A | 262 | 542 | 8.00E−65 | 0.15 | 0.68 | | “TRANSCRIPTIONAL | TRANSCRIPTION INHIBITOR BETA- |
| | | | | | | | | | REPRESSOR TUP1; CHAIN: | PROPELLER |
| | | | | | | | | | A, B, C;” | |
| 327 | 1erj | A | 215 | 524 | 1.60E−62 | 0.37 | 0.98 | | “TRANSCRIPTIONAL | TRANSCRIPTION INHIBITOR BETA- |
| | | | | | | | | | REPRESSOR TUP1; CHAIN: | PROPELLER |
| | | | | | | | | | A, B, C;” | |
| 327 | 1erj | A | 166 | 471 | 2.80E−19 | 0.41 | 0.1 | | “TRANSCRIPTIONAL | TRANSCRIPTION INHIBITOR BETA- |
| | | | | | | | | | REPRESSOR TUP1; CHAIN: | PROPELLER |
| | | | | | | | | | A, B, C;” | |
| 327 | 1got | B | 168 | 480 | 1.60E−74 | 0.07 | 0.6 | | GT-ALPHA/GI-ALPHA | “COMPLEX (GTP-BINDING/TRANSDUCER) |
| | | | | | | | | | CHIMERA; CHAIN: A; GT- | BETA1, TRANSDUCIN BETA SUBUNIT; |
| | | | | | | | | | BETA; CHAIN: B; GT- | GAMMA1, TRANSDUCIN GAMMA |
| | | | | | | | | | GAMMA; CHAIN: G; | SUBUNIT; COMPLEX (GTP- |
| | | | | | | | | | | BINDING/TRANSDUCER), G PROTEIN, |
| | | | | | | | | | | HETEROTRIMER 2 SIGNAL |
| | | | | | | | | | | TRANSDUCTION” |
| 327 | 1got | B | 249 | 564 | 1.60E−63 | 0.1 | 0.82 | | GT-ALPHA/GI-ALPHA | “COMPLEX (GTP-BINDING/TRANSDUCER) |
| | | | | | | | | | CHIMERA; CHAIN: A; GT- | BETA1, TRANSDUCIN BETA SUBUNIT; |
| | | | | | | | | | BETA; CHAIN: B; GT- | GAMMA1, TRANSDUCIN GAMMA |
| | | | | | | | | | GAMMA; CHAIN: G; | SUBUNIT; COMPLEX (GTP- |
| | | | | | | | | | | BINDING/TRANSDUCER), G PROTEIN, |
| | | | | | | | | | | HETEROTRIMER 2 SIGNAL |
| | | | | | | | | | | TRANSDUCTION” |
| 327 | 1got | B | 2 | 293 | 1.30E−56 | −0.12 | 0 | | GT-ALPHA/GI-ALPHA | “COMPLEX (GTP-BINDING/TRANSDUCER) |
| | | | | | | | | | CHIMERA; CHAIN: A; GT- | BETA1, TRANSDUCIN BETA SUBUNIT; |
| | | | | | | | | | BETA; CHAIN: B; GT- | GAMMA1, TRANSDUCIN GAMMA |
| | | | | | | | | | GAMMA; CHAIN: G; | SUBUNIT; COMPLEX (GTP- |
| | | | | | | | | | | BINDING/TRANSDUCER), G PROTEIN, |
| | | | | | | | | | | HETEROTRIMER 2 SIGNAL |
| | | | | | | | | | | TRANSDUCTION” |
| 327 | 1got | B | 358 | 576 | 4.80E−40 | 0.15 | 0.06 | | GT-ALPHA/GI-ALPHA | “COMPLEX (GTP-BINDING/TRANSDUCER) |
| | | | | | | | | | CHIMERA; CHAIN: A; GT- | BETA1, TRANSDUCIN BETA SUBUNIT; |
| | | | | | | | | | BETA; CHAIN: B; GT- | GAMMA1, TRANSDUCIN GAMMA |
| | | | | | | | | | GAMMA; CHAIN: G; | SUBUNIT; COMPLEX (GTP- |
| | | | | | | | | | | BINDING/TRANSDUCER), G PROTEIN, |
| | | | | | | | | | | HETEROTRIMER 2 SIGNAL |
| | | | | | | | | | | TRANSDUCTION” |
| 327 | 1got | B | 121 | 480 | 1.60E−74 | | | 98.86 | GT-ALPHA/GI-ALPHA | “COMPLEX (GTP-BINDING/TRANSDUCER) |
| | | | | | | | | | CHIMERA; CHAIN: A; GT- | BETA1, TRANSDUCIN BETA SUBUNIT; |
| | | | | | | | | | BETA; CHAIN: B; GT- | GAMMA1, TRANSDUCIN GAMMA |
| | | | | | | | | | GAMMA; CHAIN: G; | SUBUNIT; COMPLEX (GTP- |
| | | | | | | | | | | BINDING/TRANSDUCER), G PROTEIN, |
| | | | | | | | | | | HETEROTRIMER 2 SIGNAL |
| | | | | | | | | | | TRANSDUCTION” |
| 329 | 1a25 | A | 324 | 445 | 3.20E−25 | 0.37 | 0.99 | | “PROTEIN KINASE C | “CALCIUM-BINDING PROTEIN CALB; |
| | | | | | | | | | (BETA); CHAIN: A, B;” | CALCIUM++/PHOSPHOLIPID BINDING |
| | | | | | | | | | | PROTEIN, 2 CALCIUM-BINDING PROTEIN” |
| 329 | 1a25 | A | 186 | 295 | 8.00E−24 | 0.07 | 0.62 | | “PROTEIN KINASE C | “CALCIUM-BINDING PROTEIN CALB; |
| | | | | | | | | | (BETA); CHAIN: A, B;” | CALCIUM++/PHOSPHOLIPID BINDING |
| | | | | | | | | | | PROTEIN, 2 CALCIUM-BINDING PROTEIN” |
| 329 | 1a25 | A | 317 | 447 | 3.20E−25 | | | 53.2 | “PROTEIN KINASE C | “CALCIUM-BINDING PROTEIN CALB; |
| | | | | | | | | | (BETA); CHAIN: A, B;” | CALCIUM++/PHOSPHOLIPID BINDING |
| | | | | | | | | | | PROTEIN, 2 CALCIUM-BINDING PROTEIN” |
| 329 | 1byn | A | 186 | 308 | 9.60E−34 | 0.54 | 0.92 | | SYNAPTOTAGMIN I; CHAIN: | “ENDOCYTOSIS/EXOCYTOSIS |
| | | | | | | | | | A; | SYNAPTOTAGMIN, C2-DOMAIN, |
| | | | | | | | | | | EXOCYTOSIS, NEUROTRANSMITTER 2 |
| | | | | | | | | | | RELEASE, ENDOCYTOSIS/EXOCYTOSIS” |
| 329 | 1byn | A | 325 | 441 | 4.80E−20 | 0.55 | 0.98 | | SYNAPTOTAGMIN I; CHAIN: | “ENDOCYTOSIS/EXOCYTOSIS |
| | | | | | | | | | A; | SYNAPTOTAGMIN, C2-DOMAIN, |
| | | | | | | | | | | EXOCYTOSIS, NEUROTRANSMITTER 2 |
| | | | | | | | | | | RELEASE, ENDOCYTOSIS/EXOCYTOSIS” |
| 329 | 1cjy | A | 201 | 314 | 8.00E−14 | 0.23 | 0.11 | | “CYTOSOLIC | “HYDROLASE CPLA2; PHOSPHOLIPASE, |
| | | | | | | | | | PHOSPHOLIPASE A2; | LIPID-BINDING, HYDROLASE” |
| | | | | | | | | | CHAIN: A, B;” | |
| 329 | 1dqv | A | 189 | 453 | 3.20E−65 | 0.46 | 1 | | SYNAPTOTAGMIN III; | “ENDOCYTOSIS/EXOCYTOSIS BETA |
| | | | | | | | | | CHAIN: A; | SANDWICH, CALCIUM ION, C2 DOMAIN” |
| 329 | 1dsy | A | 185 | 299 | 6.40E−27 | 0.34 | 0.89 | | “PROTEIN KINASE C, | “TRANSFERASE CALCIUM++, |
| | | | | | | | | | ALPHA TYPE; CHAIN: A;” | PHOSPHOLIPID BINDING PROTEIN, |
| | | | | | | | | | | CALCIUM-BINDING 2 PROTEIN, |
| | | | | | | | | | | PHOSPHATIDYLSERINE, PROTEIN |
| | | | | | | | | | | KINASE C” |
| 329 | 1dsy | A | 324 | 445 | 4.80E−25 | 0.35 | 0.93 | | “PROTEIN KINASE C, | “TRANSFERASE CALCIUM++, |
| | | | | | | | | | ALPHA TYPE; CHAIN: A;” | PHOSPHOLIPID BINDING PROTEIN, |
| | | | | | | | | | | CALCIUM-BINDING 2 PROTEIN, |
| | | | | | | | | | | PHOSPHATIDYLSERINE, PROTEIN |
| | | | | | | | | | | KINASE C” |
| 329 | 1rlw | | 201 | 314 | 8.00E−14 | −0.07 | 0.13 | | PHOSPHOLIPASE A2; | “HYDROLASE CALB DOMAIN; |
| | | | | | | | | | CHAIN: NULL; | HYDROLASE, C2 DOMAIN, CALB |
| | | | | | | | | | | DOMAIN” |
| 329 | 1rsy | | 186 | 308 | 9.60E−34 | 0.02 | 0.89 | | | CALCIUM/PHOSPHOLIPID BINDING |
| | | | | | | | | | | PROTEIN SYNAPTOTAGMIN I (FIRST C2 |
| | | | | | | | | | | DOMAIN) (CALB) 1RSY 3 |
| 329 | 1rsy | | 314 | 439 | 2.80E−25 | 0.46 | 0.98 | | | CALCIUM/PHOSPHOLIPID BINDING |
| | | | | | | | | | | PROTEIN SYNAPTOTAGMIN I (FIRST C2 |
| | | | | | | | | | | DOMAIN) (CALB) 1RSY 3 |
| 329 | 1rsy | | 325 | 441 | 4.80E−20 | 0.48 | 0.9 | | | CALCIUM/PHOSPHOLIPID BINDING |
| | | | | | | | | | | PROTEIN SYNAPTOTAGMIN I (FIRST C2 |
| | | | | | | | | | | DOMAIN) (CALB) 1RSY 3 |
| 329 | 1rsy | | 311 | 442 | 2.80E−25 | | | 65.47 | | CALCIUM/PHOSPHOLIPID BINDING |
| | | | | | | | | | | PROTEIN SYNAPTOTAGMIN I (FIRST C2 |
| | | | | | | | | | | DOMAIN) (CALB) 1RSY 3 |
| 329 | 3rpb | A | 322 | 454 | 1.60E−32 | 0.65 | 1 | | RABPHILIN 3-A; CHAIN: A; | “ENDOCYTOSIS/EXOCYTOSIS C2- |
| | | | | | | | | | | DOMAINS, C2B-DOMAIN, RABPHILIN, |
| | | | | | | | | | | ENDOCYTOSIS/EXOCYTOSIS” |
| 329 | 3rpb | A | 188 | 318 | 4.80E−25 | 0.32 | 0.84 | | RABPHILIN 3-A; CHAIN: A; | “ENDOCYTOSIS/EXOCYTOSIS C2- |
| | | | | | | | | | | DOMAINS, C2B-DOMAIN, RABPHILIN, |
| | | | | | | | | | | ENDOCYTOSIS/EXOCYTOSIS” |
| 332 | 1a06 | | 1 | 213 | 3.20E−62 | −0.02 | 0.84 | | CALCIUM/CALMODULIN- | “KINASE KINASE, SIGNAL |
| | | | | | | | | | DEPENDENT PROTEIN | TRANSDUCTION, |
| | | | | | | | | | KINASE; CHAIN: NULL; | CALCIUM/CALMODULIN” |
| 332 | 1apm | E | 1 | 204 | 3.20E−74 | 0.22 | 0.89 | | | “TRANSFERASE(PHOSPHOTRANSFERASE) |
| | | | | | | | | | | $C-/AMP$-DEPENDENT PROTEIN |
| | | | | | | | | | | KINASE (E.C.2.7.1.37) ($C/APK$) 1APM 3 |
| | | | | | | | | | | (CATALYTIC SUBUNIT) ““ALPHA”” |
| | | | | | | | | | | ISOENZYME MUTANT WITH SER 139 |
| | | | | | | | | | | 1APM 4 REPLACED BY ALA (/S139A$) |
| | | | | | | | | | | COMPLEX WITH THE PEPTIDE 1APM 5 |
| | | | | | | | | | | INHIBITOR PKI(5-24) AND THE |
| | | | | | | | | | | DETERGENT MEGA-8 1APM 6” |
| 332 | 1cmk | E | 1 | 204 | 1.10E−75 | 0.16 | 0.88 | | | PHOSPHOTRANSFERASE CAMP- |
| | | | | | | | | | | DEPENDENT PROTEIN KINASE |
| | | | | | | | | | | CATALYTIC SUBUNIT 1CMK 3 |
| | | | | | | | | | | (E.C.2.7.1.37) 1CMK 4 |
| 332 | 1ctp | E | 1 | 204 | 1.10E−75 | 0.32 | 0.94 | | | TRANSFERASE(PHOSPHOTRANSFERASE) |
| | | | | | | | | | | CAMP-DEPENDENT PROTEIN KINASE |
| | | | | | | | | | | (E.C.2.7.1.37) (CAPK) 1CTP 3 (CATALYTIC |
| | | | | | | | | | | SUBUNIT) 1CTP 4 |
| 332 | 1f3m | C | 1 | 213 | 1.30E−44 | −0.17 | 0.1 | | “SERINE/THREONINE- | “TRANSFERASE KINASE DOMAIN, |
| | | | | | | | | | PROTEIN KINASE PAK- | AUTOINHIBITORY FRAGMENT, |
| | | | | | | | | | ALPHA; CHAIN: A, B; | HOMODIMER” |
| | | | | | | | | | SERINE/THREONINE- | |
| | | | | | | | | | PROTEIN KINASE PAK- | |
| | | | | | | | | | ALPHA; CHAIN: C, D;” | |
| 332 | 1koa | | 1 | 192 | 1.40E−47 | 0.36 | 0.98 | | TWITCHIN; CHAIN: NULL; | “KINASE KINASE, TWITCHIN, |
| | | | | | | | | | | INTRASTERIC REGULATION” |
| 332 | 1koa | | 1 | 213 | 1.60E−47 | 0.13 | 0.69 | | TWITCHIN; CHAIN: NULL; | “KINASE KINASE, TWITCHIN, |
| | | | | | | | | | | INTRASTERIC REGULATION” |
| 332 | 1kob | A | 1 | 213 | 1.30E−46 | 0.13 | 0.94 | | “TWITCHIN; CHAIN: A, B;” | “KINASE KINASE, TWITCHIN, |
| | | | | | | | | | | INTRASTERIC REGULATION” |
| 332 | 1phk | | 1 | 213 | 1.30E−61 | 0.21 | 0.74 | | PHOSPHORYLASE KINASE; | “KINASE RABBIT MUSCLE |
| | | | | | | | | | CHAIN: NULL; | PHOSPHORYLASE KINASE; GLYCOGEN |
| | | | | | | | | | | METABOLISM, TRANSFERASE, |
| | | | | | | | | | | SERINE/THREONINE-PROTEIN, 2 KINASE, |
| | | | | | | | | | | ATP-BINDING, CALMODULIN-BINDING” |
| 332 | 1tki | A | 1 | 192 | 1.10E−47 | 0.12 | 0.92 | | “TITIN; CHAIN: A, B;” | “SERINE KINASE SERINE KINASE, TITIN, |
| | | | | | | | | | | MUSCLE, AUTOINHIBITION” |
| 333 | 1a06 | | 1 | 243 | 3.20E−69 | 0.14 | 1 | | CALCIUM/CALMODULIN- | “KINASE KINASE, SIGNAL |
| | | | | | | | | | DEPENDENT PROTEIN | TRANSDUCTION, |
| | | | | | | | | | KINASE; CHAIN: NULL; | CALCIUM/CALMODULIN” |
| 333 | 1apm | E | 1 | 246 | 1.60E−80 | 0.19 | 0.99 | | | “TRANSFERASE(PHOSPHOTRANSFERASE) |
| | | | | | | | | | | $C-/AMP$-DEPENDENT PROTEIN |
| | | | | | | | | | | KINASE (E.C.2.7.1.37) ($C/APK$) 1APM 3 |
| | | | | | | | | | | (CATALYTIC SUBUNIT) ““ALPHA”” |
| | | | | | | | | | | ISOENZYME MUTANT WITH SER 139 |
| | | | | | | | | | | 1APM 4 REPLACED BY ALA (/S139A$) |
| | | | | | | | | | | COMPLEX WITH THE PEPTIDE 1APM 5 |
| | | | | | | | | | | INHIBITOR PKI(5-24) AND THE |
| | | | | | | | | | | DETERGENT MEGA-8 1APM 6” |
| 333 | 1cmk | E | 1 | 246 | 8.00E−82 | 0.28 | 0.84 | | | PHOSPHOTRANSFERASE CAMP- |
| | | | | | | | | | | DEPENDENT PROTEIN KINASE |
| | | | | | | | | | | CATALYTIC SUBUNIT 1CMK 3 |
| | | | | | | | | | | (E.C.2.7.1.37) 1CMK 4 |
| 333 | 1ctp | E | 1 | 246 | 1.60E−82 | 0.17 | 0.92 | | | TRANSFERASE(PHOSPHOTRANSFERASE) |
| | | | | | | | | | | CAMP-DEPENDENT PROTEIN KINASE |
| | | | | | | | | | | (E.C.2.7.1.37) (CAPK) 1CTP 3 (CATALYTIC |
| | | | | | | | | | | SUBUNIT) 1CTP 4 |
| 333 | 1f3m | C | 1 | 218 | 3.20E−46 | 0.23 | 0.57 | | “SERINE/THREONINE- | “TRANSFERASE KINASE DOMAIN, |
| | | | | | | | | | PROTEIN KINASE PAK- | AUTOINHIBITORY FRAGMENT, |
| | | | | | | | | | ALPHA; CHAIN: A, B; | HOMODIMER” |
| | | | | | | | | | SERINE/THREONINE- | |
| | | | | | | | | | PROTEIN KINASE PAK- | |
| | | | | | | | | | ALPHA; CHAIN: C, D;” | |
| 333 | 1koa | | 1 | 229 | 2.80E−54 | 0.49 | 1 | | TWITCHIN; CHAIN: NULL; | “KINASE KINASE, TWITCHIN, |
| | | | | | | | | | | INTRASTERIC REGULATION” |
| 333 | 1koa | | 1 | 221 | 3.20E−53 | 0.25 | 1 | | TWITCHIN; CHAIN: NULL; | “KINASE KINASE, TWITCHIN, |
| | | | | | | | | | | INTRASTERIC REGULATION” |
| 333 | 1kob | A | 1 | 226 | 1.60E−51 | 0.26 | 1 | | “TWITCHIN; CHAIN: A, B;” | “KINASE KINASE, TWITCHIN, |
| | | | | | | | | | | INTRASTERIC REGULATION” |
| 333 | 1phk | | 1 | 220 | 8.00E−67 | 0.31 | 1 | | PHOSPHORYLASE KINASE; | “KINASE RABBIT MUSCLE |
| | | | | | | | | | CHAIN: NULL; | PHOSPHORYLASE KINASE; GLYCOGEN |
| | | | | | | | | | | METABOLISM, TRANSFERASE, |
| | | | | | | | | | | SERINE/THREONINE-PROTEIN, 2 KINASE, |
| | | | | | | | | | | ATP-BINDING, CALMODULIN-BINDING” |
| 333 | 1tki | A | 1 | 229 | 9.80E−55 | 0.3 | 0.99 | | “TITIN; CHAIN: A, B;” | “SERINE KINASE SERINE KINASE, TITIN, |
| | | | | | | | | | | MUSCLE, AUTOINHIBITION” |
| 334 | 1a06 | | 454 | 755 | 8.00E−84 | 0.17 | 0.35 | | CALCIUM/CALMODULIN- | “KINASE KINASE, SIGNAL |
| | | | | | | | | | DEPENDENT PROTEIN | TRANSDUCTION, |
| | | | | | | | | | KINASE; CHAIN: NULL; | CALCIUM/CALMODULIN” |
| 334 | 1a06 | | 16 | 295 | 1.60E−70 | −0.04 | 0.95 | | CALCIUM/CALMODULIN- | “KINASE KINASE, SIGNAL |
| | | | | | | | | | DEPENDENT PROTEIN | TRANSDUCTION, |
| | | | | | | | | | KINASE; CHAIN: NULL; | CALCIUM/CALMODULIN” |
| 334 | 1a6o | | 470 | 731 | 8.00E−38 | 0.17 | 0.51 | | PROTEIN KINASE | “TRANSFERASE TRANSFERASE, |
| | | | | | | | | | CK2/ALPHA-SUBUNIT; | SERINE/THREONINE-PROTEIN KINASE, |
| | | | | | | | | | CHAIN: NULL; | CASEIN KINASE, 2 SER/THR KINASE” |
| 334 | 1a6o | | 23 | 271 | 1.30E−37 | 0.07 | 0.6 | | PROTEIN KINASE | “TRANSFERASE TRANSFERASE, |
| | | | | | | | | | CK2/ALPHA-SUBUNIT; | SERINE/THREONINE-PROTEIN KINASE, |
| | | | | | | | | | CHAIN: NULL; | CASEIN KINASE, 2 SER/THR KINASE” |
| 334 | 1adj | A | 790 | 1219 | 2.80E−57 | 0.08 | 1 | | “HISTIDYL-TRNA | “COMPLEX (TRNA |
| | | | | | | | | | SYNTHETASE; CHAIN: A, B, | SYNTHETASE/PEPTIDE) AMINO ACID, |
| | | | | | | | | | C, D; HISTIDINE; CHAIN: E, | HISTIDINE, COMPLEX (TRNA |
| | | | | | | | | | F, G, H;” | SYNTHETASE/PEPTIDE)” |
| 334 | 1adj | A | 1046 | 1219 | 4.80E−11 | 0.03 | 0.45 | | “HISTIDYL-TRNA | “COMPLEX (TRNA |
| | | | | | | | | | SYNTHETASE; CHAIN: A, B, | SYNTHETASE/PEPTIDE) AMINO ACID, |
| | | | | | | | | | C, D; HISTIDINE; CHAIN: E, | HISTIDINE, COMPLEX (TRNA |
| | | | | | | | | | F, G, H;” | SYNTHETASE/PEPTIDE)” |
| 334 | 1apm | E | 470 | 774 | 0 | 0.08 | 0.64 | | | “TRANSFERASE(PHOSPHOTRANSFERASE) |
| | | | | | | | | | | $C-/AMP$-DEPENDENT PROTEIN |
| | | | | | | | | | | KINASE (E.C.2.7.1.37) ($C/APK$) 1APM 3 |
| | | | | | | | | | | (CATALYTIC SUBUNIT) ““ALPHA”” |
| | | | | | | | | | | ISOENZYME MUTANT WITH SER 139 |
| | | | | | | | | | | 1APM 4 REPLACED BY ALA (/S139A$) |
| | | | | | | | | | | COMPLEX WITH THE PEPTIDE 1APM 5 |
| | | | | | | | | | | INHIBITOR PKI(5-24) AND THE |
| | | | | | | | | | | DETERGENT MEGA-8 1APM 6” |
| 334 | 1apm | E | 16 | 320 | 1.30E−97 | 0.32 | 0.98 | | | “TRANSFERASE(PHOSPHOTRANSFERASE) |
| | | | | | | | | | | $C-/AMP$-DEPENDENT PROTEIN |
| | | | | | | | | | | KINASE (E.C.2.7.1.37) ($C/APK$) 1APM 3 |
| | | | | | | | | | | (CATALYTIC SUBUNIT) ““ALPHA”” |
| | | | | | | | | | | ISOENZYME MUTANT WITH SER 139 |
| | | | | | | | | | | 1APM 4 REPLACED BY ALA (/S139A$) |
| | | | | | | | | | | COMPLEX WITH THE PEPTIDE 1APM 5 |
| | | | | | | | | | | INHIBITOR PKI(5-24) AND THE |
| | | | | | | | | | | DETERGENT MEGA-8 1APM 6″ |
| 334 | 1aq1 | | 470 | 741 | 1.60E−53 | −0.02 | 0.69 | | CYCLIN-DEPENDENT | “PROTEIN KINASE CDK2; PROTEIN |
| | | | | | | | | | PROTEIN KINASE 2; CHAIN: | KINASE, CELL CYCLE, |
| | | | | | | | | | NULL; | PHOSPHORYLATION, STAUROSPORINE, 2 |
| | | | | | | | | | | CELL DIVISION, MITOSIS, INHIBITION” |
| 334 | 1aq1 | | 22 | 274 | 3.20E−46 | −0.05 | 0.25 | | CYCLIN-DEPENPENT | “PROTEIN KINASE CDK2; PROTEIN |
| | | | | | | | | | PROTEIN KINASE 2; CHAIN: | KINASE, CELL CYCLE, |
| | | | | | | | | | NULL; | PHOSPHORYLATION, STAUROSPORINE, 2 |
| | | | | | | | | | | CELL DIVISION, MITOSIS, INHIBITION” |
| 334 | 1bi8 | A | 470 | 731 | 4.80E−41 | 0.1 | 0.77 | | “CYCLIN-DEPENDENT | “COMPLEX (KINASE/INHIBITOR) CDK6; |
| | | | | | | | | | KINASE 6; CHAIN: A, C; | P19INK4D; CYCLIN DEPENDENT KINASE, |
| | | | | | | | | | CYCLIN-DEPENDENT | CYCLIN DEPENDENT KINASE |
| | | | | | | | | | KINASE INHIBITOR; CHAIN: | INHIBITORY 2 PROTEIN, CDK, INK4, CELL |
| | | | | | | | | | B, D;” | CYCLE, COMPLEX (KINASE/INHIBITOR) |
| | | | | | | | | | | HEADER HELIX” |
| 334 | 1bi8 | A | 23 | 269 | 3.20E−38 | −0.16 | 0.9 | | “CYCLIN-DEPENDENT | “COMPLEX (KINASE/INHIBITOR) CDK6; |
| | | | | | | | | | KINASE 6; CHAIN: A, C; | P19INK4D; CYCLIN DEPENDENT KINASE, |
| | | | | | | | | | CYCLIN-DEPENDENT | CYCLIN DEPENDENT KINASE |
| | | | | | | | | | KINASE INHIBITOR; CHAIN: | INHIBITORY 2 PROTEIN, CDK, INK4, CELL |
| | | | | | | | | | B, D;” | CYCLE, COMPLEX (KINASE/INHIBITOR) |
| | | | | | | | | | | HEADER HELIX” |
| 334 | 1blx | A | 470 | 732 | 4.80E−43 | 0.01 | 0.99 | | CYCLIN-DEPENDENT | “COMPLEX (INHIBITOR |
| | | | | | | | | | KINASE 6; CHAIN: A; | PROTEIN/KINASE) INHIBITOR PROTEIN, |
| | | | | | | | | | P19INK4D; CHAIN: B; | CYCLIN-DEPENDENT KINASE, CELL |
| | | | | | | | | | | CYCLE 2 CONTROL, ALPHA/BETA, |
| | | | | | | | | | | COMPLEX (INHIBITOR |
| | | | | | | | | | | PROTEIN/KINASE)” |
| 334 | 1blx | A | 23 | 270 | 1.60E−42 | 0.18 | 1 | | CYCLIN-DEPENDENT | “COMPLEX (INHIBITOR |
| | | | | | | | | | KINASE 6; CHAIN: A; | PROTEIN/KINASE) INHIBITOR PROTEIN, |
| | | | | | | | | | P19INK4D; CHAIN: B; | CYCLIN-DEPENDENT KINASE, CELL |
| | | | | | | | | | | CYCLE 2 CONTROL, ALPHA/BETA, |
| | | | | | | | | | | COMPLEX (INHIBITOR |
| | | | | | | | | | | PROTEIN/KINASE)” |
| 334 | 1cm8 | A | 477 | 740 | 1.60E−43 | −0.02 | 0.71 | | “PHOSPHORYLATED MAP | “TRANSFERASE STRESS-ACTIVATED |
| | | | | | | | | | KINASE P38-GAMMA; | PROTEIN KINASE-3, ERK6, ERK5; P38- |
| | | | | | | | | | CHAIN: A, B;” | GAMMA, GAMMA, PHOSPHORYLATION, |
| | | | | | | | | | | MAP KINASE” |
| 334 | 1cm8 | A | 50 | 279 | 3.20E−36 | 0.23 | 0.76 | | “PHOSPHORYLATED MAP | “TRANSFERASE STRESS-ACTIVATED |
| | | | | | | | | | KINASE P38-GAMMA; | PROTEIN KINASE-3, ERK6, ERK5; P38- |
| | | | | | | | | | CHAIN: A, B;” | GAMMA, GAMMA, PHOSPHORYLATION, |
| | | | | | | | | | | MAP KINASE” |
| 334 | 1cmk | E | 470 | 774 | 0 | 0.03 | 0.78 | | | PHOSPHOTRANSFERASE CAMP- |
| | | | | | | | | | | DEPENDENT PROTEIN KINASE |
| | | | | | | | | | | CATALYTIC SUBUNIT 1CMK 3 |
| | | | | | | | | | | (E.C.2.7.1.37) 1CMK 4 |
| 334 | 1cmk | E | 14 | 320 | 1.30E−99 | 0.2 | 1 | | | PHOSPHOTRANSFERASE CAMP- |
| | | | | | | | | | | DEPENDENT PROTEIN KINASE |
| | | | | | | | | | | CATALYTIC SUBUNIT 1CMK 3 |
| | | | | | | | | | | (E.C.2.7.1.37) 1CMK 4 |
| 334 | 1ctp | E | 470 | 752 | 0 | 0.16 | 0.94 | | | TRANSFERASE(PHOSPHOTRANSFERASE) |
| | | | | | | | | | | CAMP-DEPENDENT PROTEIN KINASE |
| | | | | | | | | | | (E.C.2.7.1.37) (CAPK) 1CTP 3 (CATALYTIC |
| | | | | | | | | | | SUBUNIT) 1CTP 4 |
| 334 | 1ctp | E | 14 | 309 | 4.80E−97 | 0.16 | 0.98 | | | TRANSFERASE(PHOSPHOTRANSFERASE) |
| | | | | | | | | | | CAMP-DEPENDENT PROTEIN KINASE |
| | | | | | | | | | | (E.C.2.7.1.37) (CAPK) 1CTP 3 (CATALYTIC |
| | | | | | | | | | | SUBUNIT) 1CTP 4 |
| 334 | 1evl | A | 1126 | 1222 | 0.0008 | 0.6 | 0.89 | | “THREONYL-TRNA | “LIGASE AMINO ACID RECOGNITION, |
| | | | | | | | | | SYNTHETASE; CHAIN: A, B, | ZINC ION, TRNA-SYNTHETASE, 2 |
| | | | | | | | | | C, D;” | ADENYLATE ANALOG, DELETION |
| | | | | | | | | | | MUTANT” |
| 334 | 1f3m | C | 470 | 731 | 6.40E−56 | 0.36 | 1 | | “SERINE/THREONINE- | “TRANSFERASE KINASE DOMAIN, |
| | | | | | | | | | PROTEIN KINASE PAK- | AUTOINHIBITORY FRAGMENT, |
| | | | | | | | | | ALPHA; CHAIN: A, B; | HOMODIMER” |
| | | | | | | | | | SERINE/THREONINE- | |
| | | | | | | | | | PROTEIN KINASE PAK- | |
| | | | | | | | | | ALPHA; CHAIN: C, D;” | |
| 334 | 1f3m | C | 10 | 269 | 1.40E−51 | 0.06 | 0.88 | | “SERINE/THREONINE- | “TRANSFERASE KINASE DOMAIN, |
| | | | | | | | | | PROTEIN KINASE PAK- | AUTOINHIBITORY FRAGMENT, |
| | | | | | | | | | ALPHA; CHAIN: A, B; | HOMODIMER” |
| | | | | | | | | | SERINE/THREONINE- | |
| | | | | | | | | | PROTEIN KINASE PAK- | |
| | | | | | | | | | ALPHA; CHAIN: C, D;” | |
| 334 | 1fpu | A | 470 | 736 | 3.20E−32 | 0.2 | 0.04 | | “PROTO-ONCOGENE | “TRANSFERASE P150, C-ABL; KINASE, |
| | | | | | | | | | TYROSINE-PROTEIN | KINASE INHIBITOR, STI-571, ACTIVATION |
| | | | | | | | | | KINASE ABL; CHAIN: A, B;” | LOOP” |
| 334 | 1hcl | | 470 | 741 | 1.60E−55 | 0.17 | 0.94 | | HUMAN CYCLIN- | “PROTEIN KINASE CDK2; TRANSFERASE, |
| | | | | | | | | | DEPENDENT KINASE 2; | SERINE/THREONINE PROTEIN KINASE, |
| | | | | | | | | | CHAIN: NULL; | ATP-BINDING, 2 CELL CYCLE, CELL |
| | | | | | | | | | | DIVISION, MITOSIS, PHOSPHORYLATION” |
| 334 | 1hcl | | 22 | 274 | 3.20E−49 | 0.1 | 0.57 | | HUMAN CYCLIN- | “PROTEIN KINASE CDK2; TRANSFERASE, |
| | | | | | | | | | DEPENDENT KINASE 2; | SERINE/THREONINE PROTEIN KINASE, |
| | | | | | | | | | CHAIN: NULL; | ATP-BINDING, 2 CELL CYCLE, CELL |
| | | | | | | | | | | DIVISION, MITOSIS, PHOSPHORYLATION” |
| 334 | 1htt | A | 986 | 1219 | 5.60E−30 | −0.16 | 0.78 | | “HISTIDYL-TRNA | “COMPLEX (TRNA SYNTHETASE/HIS- |
| | | | | | | | | | SYNTHETASE; CHAIN: A, B, | ADENYLATE) HISTIDINE-TRNA LIGASE; |
| | | | | | | | | | C, D; HISTIDYL- | COMPLEX (TRNA SYNTHETASE/HIS- |
| | | | | | | | | | ADENYLATE; CHAIN: E, F, | ADENYLATE), AMINOACYL-TRNA 2 |
| | | | | | | | | | G, H;” | SYNTHASE, LIGASE, SYNTHETASE” |
| 334 | 1htt | A | 1046 | 1219 | 1.60E−14 | −0.29 | 0.29 | | “HISTIDYL-TRNA | “COMPLEX (TRNA SYNTHETASE/HIS- |
| | | | | | | | | | SYNTHETASE; CHAIN: A, B, | ADENYLATE) HISTIDINE-TRNA LIGASE; |
| | | | | | | | | | C, D; HISTIDYL- | COMPLEX (TRNA SYNTHETASE/HIS- |
| | | | | | | | | | ADENYLATE; CHAIN: E, F, | ADENYLATE), AMINOACYL-TRNA 2 |
| | | | | | | | | | G, H;” | SYNTHASE, LIGASE, SYNTHETASE” |
| 334 | 1ian | | 23 | 277 | 1.60E−33 | −0.17 | 0.37 | | P38 MAP KINASE; CHAIN: | “SERINE/THREONINE-PROTEIN KINASE |
| | | | | | | | | | NULL; | CSBP, RK, P38; PROTEIN SER/THR- |
| | | | | | | | | | | KINASE, SERINE/THREONINE-PROTEIN |
| | | | | | | | | | | KINASE” |
| 334 | 1jnk | | 470 | 748 | 1.60E−41 | 0.17 | 0.99 | | C-JUN N-TERMINAL | “TRANSFERASE JNK3; TRANSFERASE, |
| | | | | | | | | | KINASE; CHAIN: NULL; | JNK3 MAP KINASE, SERINE/THREONINE |
| | | | | | | | | | | PROTEIN 2 KINASE” |
| 334 | 1jnk | | 22 | 212 | 4.80E−33 | −0.23 | 0.03 | | C-JUN N-TERMINAL | “TRANSFERASE JNK3; TRANSFERASE, |
| | | | | | | | | | KINASE; CHAIN: NULL; | JNK3 MAP KINASE, SERINE/THREONINE |
| | | | | | | | | | | PROTEIN 2 KINASE” |
| 334 | 1jnk | | 241 | 285 | 4.80E−07 | −0.38 | 0.06 | | C-JUN N-TERMINAL | “TRANSFERASE JNK3; TRANSFERASE, |
| | | | | | | | | | KINASE; CHAIN: NULL; | JNK3 MAP KINASE, SERINE/THREONINE |
| | | | | | | | | | | PROTEIN 2 KINASE” |
| 334 | 1kmm | A | 779 | 1219 | 1.40E−47 | −0.03 | 1 | | “HISTIDYL-TRNA | “AMINOACYL-TRNA SYNTHASE |
| | | | | | | | | | SYNTHETASE; CHAIN: A, B, | HISTIDINE-TRNA LIGASE; AMINOACYL- |
| | | | | | | | | | C, D;” | TRNA SYNTHASE, LIGASE, |
| | | | | | | | | | | SYNTHETASE” |
| 334 | 1kmm | A | 1046 | 1219 | 3.20E−15 | −0.07 | 0.17 | | “HISTIDYL-TRNA | “AMINOACYL-TRNA SYNTHASE |
| | | | | | | | | | SYNTHETASE; CHAIN: A, B, | HISTIDINE-TRNA LIGASE; AMINOACYL- |
| | | | | | | | | | C, D;” | TRNA SYNTHASE, LIGASE, |
| | | | | | | | | | | SYNTHETASE” |
| 334 | 1koa | | 470 | 730 | 1.40E−64 | 0.07 | 0.93 | | TWITCHIN; CHAIN: NULL; | “KINASE KINASE, TWITCHIN, |
| | | | | | | | | | | INTRASTERIC REGULATION” |
| 334 | 1koa | | 22 | 281 | 4.80E−57 | 0.26 | 1 | | TWITCHIN; CHAIN: NULL; | “KINASE KINASE, TWITCHIN, |
| | | | | | | | | | | INTRASTERIC REGULATION” |
| 334 | 1kob | A | 470 | 734 | 3.20E−65 | 0.14 | 1 | | “TWITCHIN; CHAIN: A, B;” | “KINASE KINASE, TWITCHIN, |
| | | | | | | | | | | INTRASTERIC REGULATION” |
| 334 | 1kob | A | 23 | 270 | 1.60E−57 | 0.06 | 0.68 | | “TWITCHIN; CHAIN: A, B;” | “KINASE KINASE, TWITCHIN, |
| | | | | | | | | | | INTRASTERIC REGULATION” |
| 334 | 1p38 | | 23 | 277 | 9.60E−40 | 0.17 | 0.99 | | MAP KINASE P38; CHAIN: | “TRANSFERASE MITOGEN ACTIVATED |
| | | | | | | | | | NULL; | PROTEIN KINASE; TRANSFERASE, MAP |
| | | | | | | | | | | KINASE, SERINE/THREONINE-PROTEIN |
| | | | | | | | | | | KINASE, 2 P38” |
| 334 | 1phk | | 470 | 733 | 1.10E−81 | 0.22 | 0.99 | | PHOSPHORYLASE KINASE; | “KINASE RABBIT MUSCLE |
| | | | | | | | | | CHAIN: NULL; | PHOSPHORYLASE KINASE; GLYCOGEN |
| | | | | | | | | | | METABOLISM, TRANSFERASE, |
| | | | | | | | | | | SERINE/THREONINE-PROTEIN, 2 KINASE, |
| | | | | | | | | | | ATP-BINDING, CALMODULIN-BINDING” |
| 334 | 1phk | | 21 | 269 | 3.20E−70 | 0.3 | 0.96 | | PHOSPHORYLASE KINASE; | “KINASE RABBIT MUSCLE |
| | | | | | | | | | CHAIN: NULL; | PHOSPHORYLASE KINASE; GLYCOGEN |
| | | | | | | | | | | METABOLISM, TRANSFERASE, |
| | | | | | | | | | | SERINE/THREONINE-PROTEIN, 2 KINASE, |
| | | | | | | | | | | ATP-BINDING, CALMODULIN-BINDING” |
| 334 | 1pme | | 474 | 752 | 1.60E−43 | −0.09 | 0.23 | | ERK2; CHAIN: NULL; | “TRANSFERASE MAP KINASE, |
| | | | | | | | | | | SERINE/THREONINE PROTEIN KINASE, |
| | | | | | | | | | | TRANSFERASE” |
| 334 | 1pme | | 24 | 277 | 8.00E−34 | 0.13 | 0.82 | | ERK2; CHAIN: NULL; | “TRANSFERASE MAP KINASE, |
| | | | | | | | | | | SERINE/THREONINE PROTEIN KINASE, |
| | | | | | | | | | | TRANSFERASE” |
| 334 | 1qcf | A | 470 | 724 | 4.80E−30 | 0.05 | 0.65 | | HAEMATOPOETIC CELL | “TYROSINE KINASE TYROSINE KINASE- |
| | | | | | | | | | KINASE (HCK); CHAIN: A; | INHIBITOR COMPLEX, DOWN- |
| | | | | | | | | | | REGULATED KINASE, 2 ORDERED |
| | | | | | | | | | | ACTIVATION LOOP” |
| 334 | 1qe0 | A | 779 | 1217 | 7.00E−25 | −0.27 | 0.66 | | “HISTIDYL-TRNA | “LIGASE CLASS II TRNA SYNTHETASE, |
| | | | | | | | | | SYNTHETASE; CHAIN: A, | BETA SHEET” |
| | | | | | | | | | B;” | |
| 334 | 1qe0 | B | 975 | 1215 | 1.40E−22 | −0.03 | 0.92 | | “HISTIDYL-TRNA | “LIGASE CLASS II TRNA SYNTHETASE, |
| | | | | | | | | | SYNTHETASE; CHAIN: A, | BETA SHEET” |
| | | | | | | | | | B;” | |
| 334 | 1qe0 | A | 1043 | 1217 | 8.00E−19 | −0.23 | 0.59 | | “HISTIDYL-TRNA | “LIGASE CLASS II TRNA SYNTHETASE, |
| | | | | | | | | | SYNTHETASE; CHAIN: A, | BETA SHEET” |
| | | | | | | | | | B;” | |
| 334 | 1qe0 | B | 1043 | 1216 | 1.60E−18 | −0.17 | 0.55 | | “HISTIDYL-TRNA | “LIGASE CLASS II TRNA SYNTHETASE, |
| | | | | | | | | | SYNTHETASE; CHAIN: A, | BETA SHEET” |
| | | | | | | | | | B;” | |
| 334 | 1qf6 | A | 1126 | 1222 | 0.0008 | 0.36 | 0.87 | | THREONYL-TRNA | “LIGASE/RNA THRRS; TRNA (THR); |
| | | | | | | | | | SYNTHETASE; CHAIN: A; | THREONYL-TRNA SYNTHETASE, |
| | | | | | | | | | THREONINE TRNA; CHAIN: | TRNA(THR), AMP, ZINC, MRNA, 2 |
| | | | | | | | | | B; | AMINOACYLATION, TRANSLATIONAL |
| | | | | | | | | | | REGULATION, PROTEIN/RNA” |
| 334 | 1tki | A | 470 | 731 | 3.20E−52 | 0.19 | 0.83 | | “TITIN; CHAIN: A, B;” | “SERINE KINASE SERINE KINASE, TITIN, |
| | | | | | | | | | | MUSCLE, AUTOINHIBITION” |
| 334 | 1tki | A | 19 | 269 | 6.40E−45 | 0.24 | 0.89 | | “TITIN; CHAIN: A, B;” | “SERINE KINASE SERINE KINASE, TITIN, |
| | | | | | | | | | | MUSCLE, AUTOINHIBITION” |
| 334 | 3erk | | 458 | 751 | 1.60E−45 | 0 | 0.28 | | EXTRACELLULAR | “TRANSFERASE MITOGEN ACTIVATED |
| | | | | | | | | | REGULATED KINASE 2; | PROTEIN KINASE, MAP 2, ERK2; |
| | | | | | | | | | CHAIN: NULL; | TRANSFERASE, SERINE/THREONINE- |
| | | | | | | | | | | PROTEIN KINASE, MAP KINASE, 2 ERK2” |
| 334 | 3erk | | 24 | 304 | 1.10E−38 | 0.33 | 0.84 | | EXTRACELLULAR | “TRANSFERASE MITOGEN ACTIVATED |
| | | | | | | | | | REGULATED KINASE 2; | PROTEIN KINASE, MAP 2, ERK2; |
| | | | | | | | | | CHAIN: NULL; | TRANSFERASE, SERINE/THREONINE- |
| | | | | | | | | | | PROTEIN KINASE, MAP KINASE, 2 ERK2” |
| 335 | 1hcl | | 1291 | 1558 | 3.20E−59 | | | 124.84 | HUMAN CYCLIN- | “PROTEIN KINASE CDK2; TRANSFERASE, |
| | | | | | | | | | DEPENDENT KINASE 2; | SERINE/THREONINE PROTEIN KINASE, |
| | | | | | | | | | CHAIN: NULL; | ATP-BINDING, 2 CELL CYCLE, CELL |
| | | | | | | | | | | DIVISION, MITOSIS, PHOSPHORYLATION” |
| 335 | 1phk | | 1291 | 1555 | 1.40E−77 | | | 117.56 | PHOSPHORYLASE KINASE; | “KINASE RABBIT MUSCLE |
| | | | | | | | | | CHAIN: NULL; | PHOSPHORYLASE KINASE; GLYCOGEN |
| | | | | | | | | | | METABOLISM, TRANSFERASE, |
| | | | | | | | | | | SERINE/THREONINE-PROTEIN, 2 KINASE, |
| | | | | | | | | | | ATP-BINDING, CALMODULIN-BINDING” |
| 336 | 1btn | | 92 | 164 | 9.80E−07 | 0.66 | 0.52 | | BETA-SPECTRIN; 1BTN 4 | SIGNAL TRANSDUCTION PROTEIN |
| | | | | | | | | | CHAIN: NULL; 1BTN 5 | |
| 336 | 1dcq | A | 173 | 311 | 7.00E−31 | 0.19 | 0.99 | | PYK2-ASSOCIATED | “METAL BINDING PROTEIN ZINC- |
| | | | | | | | | | PROTEIN BETA; CHAIN: A; | BINDING MODULE, ANKYRIN REPEATS, |
| | | | | | | | | | | METAL BINDING PROTEIN” |
| 336 | 1fao | A | 75 | 165 | 1.40E−11 | 0.41 | 0.87 | | DUAL ADAPTOR OF | “SIGNALING PROTEIN DAPP1, PHISH, |
| | | | | | | | | | PHOSPHOTYROSINE AND 3- | BAM32; PLECKSTRIN, 3- |
| | | | | | | | | | CHAIN: A; | PHOSPHOINOSITIDES, INOSITOL |
| | | | | | | | | | | TETRAKISPHOSPHATE 2 SIGNAL |
| | | | | | | | | | | TRANSDUCTION PROTEIN, ADAPTOR |
| | | | | | | | | | | PROTEIN” |
| 336 | 1fao | A | 1 | 61 | 1.40E−11 | −0.01 | 0.17 | | DUAL ADAPTOR OF | “SIGNALING PROTEIN DAPP1, PHISH, |
| | | | | | | | | | PHOSPHOTYROSINE AND 3- | BAM32; PLECKSTRIN, 3- |
| | | | | | | | | | CHAIN: A; | PHOSPHOINOSITIDES, INOSITOL |
| | | | | | | | | | | TETRAKISPHOSPHATE 2 SIGNAL |
| | | | | | | | | | | TRANSDUCTION PROTEIN, ADAPTOR |
| | | | | | | | | | | PROTEIN” |
| 336 | 1fao | A | 2 | 58 | 1.40E−05 | −0.21 | 0.48 | | DUAL ADAPTOR OF | “SIGNALING PROTEIN DAPP1, PHISH, |
| | | | | | | | | | PHOSPHOTYROSINE AND 3- | BAM32; PLECKSTRIN, 3- |
| | | | | | | | | | CHAIN: A; | PHOSPHOINOSITIDES, INOSITOL |
| | | | | | | | | | | TETRAKISPHOSPHATE 2 SIGNAL |
| | | | | | | | | | | TRANSDUCTION PROTEIN, ADAPTOR |
| | | | | | | | | | | PROTEIN” |
| 336 | 1fb8 | A | 1 | 65 | 2.80E−12 | −0.05 | 0.25 | | DUAL ADAPTOR OF | “SIGNALING PROTEIN DAPP1, PHISH, |
| | | | | | | | | | PHOSPHOTYROSINE AND 3- | BAM32; PLECKSTRIN, 3- |
| | | | | | | | | | CHAIN: A; | PHOSPHOINOSITIDES, INOSITOL |
| | | | | | | | | | | TETRAKISPHOSPHATE 2 SIGNAL |
| | | | | | | | | | | TRANSDUCTION PROTEIN, ADAPTOR |
| | | | | | | | | | | PROTEIN” |
| 336 | 1fb8 | A | 72 | 165 | 2.80E−12 | 0.45 | 0.52 | | DUAL ADAPTOR OF | “SIGNALING PROTEIN DAPP1, PHISH, |
| | | | | | | | | | PHOSPHOTYROSINE AND 3- | BAM32; PLECKSTRIN, 3- |
| | | | | | | | | | CHAIN: A; | PHOSPHOINOSITIDES, INOSITOL |
| | | | | | | | | | | TETRAKISPHOSPHATE 2 SIGNAL |
| | | | | | | | | | | TRANSDUCTION PROTEIN, ADAPTOR |
| | | | | | | | | | | PROTEIN” |
| 336 | 1fb8 | A | 2 | 58 | 1.40E−05 | 0.1 | 0.57 | | DUAL ADAPTOR OF | “SIGNALING PROTEIN DAPP1, PHISH, |
| | | | | | | | | | PHOSPHOTYROSINE AND 3- | BAM32; PLECKSTRIN, 3- |
| | | | | | | | | | CHAIN: A; | PHOSPHOINOSITIDES, INOSITOL |
| | | | | | | | | | | TETRAKISPHOSPHATE 2 SIGNAL |
| | | | | | | | | | | TRANSDUCTION PROTEIN, ADAPTOR |
| | | | | | | | | | | PROTEIN” |
| 336 | 1pls | | 1 | 67 | 1.40E−08 | 0.19 | 0.35 | | | “PHOSPHORYLATION PLECKSTRIN (N- |
| | | | | | | | | | | TERMINAL PLECKSTRIN HOMOLOGY |
| | | | | | | | | | | DOMAIN) MUTANT 1PLS 3 WITH LEU GLU |
| | | | | | | | | | | (HIS)6 ADDED TO THE C TERMINUS 1PLS |
| | | | | | | | | | | 4 (INS(G105-LEHHHHHH)) (NMR, 25 |
| | | | | | | | | | | STRUCTURES) 1PLS 5” |
| 336 | 1pms | | 45 | 166 | 2.80E−09 | 0.16 | 0.12 | | SOS 1; CHAIN: NULL; | “SIGNAL TRANSDUCTION SON OF |
| | | | | | | | | | | SEVENLESS; PLECKSTRIN, SON OF |
| | | | | | | | | | | SEVENLESS, SIGNAL TRANSDUCTION” |
| 336 | 1qqg | A | 2 | 64 | 0.00064 | −0.29 | 0.07 | | “INSULIN RECEPTOR | “SIGNAL TRANSDUCTION IRS-1; BETA- |
| | | | | | | | | | SUBSTRATE 1; CHAIN: A, | SANDWHICH, SIGNAL TRANSDUCTION” |
| | | | | | | | | | B;” | |
| 337 | 1a06 | | 434 | 695 | 1.60E−78 | 0.24 | 1 | | CALCIUM/CALMODULIN- | “KINASE KINASE, SIGNAL |
| | | | | | | | | | DEPENDENT PROTEIN | TRANSDUCTION, |
| | | | | | | | | | KINASE; CHAIN: NULL; | CALCIUM/CALMODULIN” |
| 337 | 1a06 | | 426 | 723 | 1.60E−78 | | | 114.97 | CALCIUM/CALMODULIN- | “KINASE KINASE, SIGNAL |
| | | | | | | | | | DEPENDENT PROTEIN | TRANSDUCTION, |
| | | | | | | | | | KINASE; CHAIN: NULL; | CALCIUM/CALMODULIN” |
| 337 | 1apm | E | 431 | 725 | 0 | 0.81 | 1 | | | “TRANSFERASE(PHOSPHOTRANSFERASE |
| | | | | | | | | | | ) $C-/AMP$-DEPENDENT PROTEIN |
| | | | | | | | | | | KINASE (E.C.2.7.1.37) ($C/APK$) 1APM 3 |
| | | | | | | | | | | (CATALYTIC SUBUNIT) ““ALPHA”” |
| | | | | | | | | | | ISOENZYME MUTANT WITH SER 139 |
| | | | | | | | | | | 1APM 4 REPLACED BY ALA (/S139A$) |
| | | | | | | | | | | COMPLEX WITH THE PEPTIDE 1APM 5 |
| | | | | | | | | | | INHIBITOR PKI(5-24) AND THE |
| | | | | | | | | | | DETERGENT MEGA-8 1APM 6” |
| 337 | 1apm | E | 401 | 744 | 0 | | | 256.61 | | “TRANSFERASE(PHOSPHOTRANSFERASE |
| | | | | | | | | | | ) $C-/AMP$-DEPENDENT PROTEIN |
| | | | | | | | | | | KINASE (E.C.2.7.1.37) ($C/APK$) 1APM 3 |
| | | | | | | | | | | (CATALYTIC SUBUNIT) ““ALPHA”” |
| | | | | | | | | | | ISOENZYME MUTANT WITH SER 139 |
| | | | | | | | | | | 1APM 4 REPLACED BY ALA (/S139A$) |
| | | | | | | | | | | COMPLEX WITH THE PEPTIDE 1APM 5 |
| | | | | | | | | | | INHIBITOR PKI(5-24) AND THE |
| | | | | | | | | | | DETERGENT MEGA-8 1APM 6” |
| 337 | 1cmk | E | 431 | 725 | 0 | 0.96 | 1 | | | PHOSPHOTRANSFERASE CAMP- |
| | | | | | | | | | | DEPENDENT PROTEIN KINASE |
| | | | | | | | | | | CATALYTIC SUBUNIT 1CMK 3 |
| | | | | | | | | | | (E.C.2.7.1.37) 1CMK 4 |
| 337 | 1cmk | E | 392 | 744 | 0 | | | 261.92 | | PHOSPHOTRANSFERASE CAMP- |
| | | | | | | | | | | DEPENDENT PROTEIN KINASE |
| | | | | | | | | | | CATALYTIC SUBUNIT 1CMK 3 |
| | | | | | | | | | | (E.C.2.7.1.37) 1CMK 4 |
| 337 | 1ctp | E | 431 | 716 | 0 | 0.74 | 1 | | | TRANSFERASE(PHOSPHOTRANSFERASE) |
| | | | | | | | | | | CAMP-DEPENDENT PROTEIN KINASE |
| | | | | | | | | | | (E.C.2.7.1.37) (CAPK) 1CTP 3 (CATALYTIC |
| | | | | | | | | | | SUBUNIT) 1CTP 4 |
| 337 | 1ctp | E | 398 | 735 | 0 | | | 247.17 | | TRANSFERASE(PHOSPHOTRANSFERASE) |
| | | | | | | | | | | CAMP-DEPENDENT PROTEIN KINASE |
| | | | | | | | | | | (E.C.2.7.1.37) (CAPK) 1CTP 3 (CATALYTIC |
| | | | | | | | | | | SUBUNIT) 1CTP 4 |
| 337 | 1hcl | | 431 | 694 | 1.40E−45 | 0.64 | 1 | | HUMAN CYCLIN- | “PROTEIN KINASE CDK2; TRANSFERASE, |
| | | | | | | | | | DEPENDENT KINASE 2; | SERINE/THREONINE PROTEIN KINASE, |
| | | | | | | | | | CHAIN: NULL; | ATP-BINDING, 2 CELL CYCLE, CELL |
| | | | | | | | | | | DIVISION, MITOSIS, PHOSPHORYLATION” |
| 337 | 1hcl | | 431 | 722 | 1.40E−45 | | | 120.53 | HUMAN CYCLIN- | “PROTEIN KINASE CDK2; TRANSFERASE, |
| | | | | | | | | | DEPENDENT KINASE 2; | SERINE/THREONINE PROTEIN KINASE, |
| | | | | | | | | | CHAIN: NULL; | ATP-BINDING, 2 CELL CYCLE, CELL |
| | | | | | | | | | | DIVISION, MITOSIS, PHOSPHORYLATION” |
| 337 | 1koa | | 431 | 692 | 4.80E−66 | 0.52 | 1 | | TWITCHIN; CHAIN: NULL; | “KINASE KINASE, TWITCHIN, |
| | | | | | | | | | | INTRASTERIC REGULATION” |
| 337 | 1kob | A | 432 | 704 | 6.40E−67 | 0.51 | 1 | | “TWITCHIN; CHAIN: A, B;” | “KINASE KINASE, TWITCHIN, |
| | | | | | | | | | | INTRASTERIC REGULATION” |
| 337 | 1kob | A | 404 | 764 | 6.40E−67 | | | 133.81 | “TWITCHIN; CHAIN: A, B;” | “KINASE KINASE, TWITCHIN, |
| | | | | | | | | | | INTRASTERIC REGULATION” |
| 337 | 1phk | | 433 | 694 | 2.80E−86 | 0.58 | 1 | | PHOSPHORYLASE KINASE; | “KINASE RABBIT MUSCLE |
| | | | | | | | | | CHAIN: NULL; | PHOSPHORYLASE KINASE; GLYCOGEN |
| | | | | | | | | | | METABOLISM, TRANSFERASE, |
| | | | | | | | | | | SERINE/THREONINE-PROTEIN, 2 KINASE, |
| | | | | | | | | | | ATP-BINDING, CALMODULIN-BINDING” |
| 337 | 1phk | | 431 | 695 | 2.80E−86 | | | 113.37 | PHOSPHORYLASE KINASE; | “KINASE RABBIT MUSCLE |
| | | | | | | | | | CHAIN: NULL; | PHOSPHORYLASE KINASE; GLYCOGEN |
| | | | | | | | | | | METABOLISM, TRANSFERASE, |
| | | | | | | | | | | SERINE/THREONINE-PROTEIN, 2 KINASE, |
| | | | | | | | | | | ATP-BINDING, CALMODULIN-BINDING” |
| 338 | 1d0s | A | 312 | 602 | 2.80E−11 | 0 | −0.2 | | “NICOTINATE | “TRANSFERASE DINUCLEOTIDE- |
| | | | | | | | | | MONONUCLEOTIDE: 5, 6- | BINDING MOTIF, PHOSPHORIBOSYL |
| | | | | | | | | | CHAIN: A;” | TRANSFERASE” |
| 344 | 1a5e | | 287 | 447 | 1.50E−21 | | | 53.64 | TUMOR SUPPRESSOR | “ANTI-ONCOGENE CELL CYCLE, ANTI- |
| | | | | | | | | | P16INK4A; CHAIN: NULL; | ONCOGENE, REPEAT, ANK REPEAT” |
| 344 | 1awc | B | 298 | 451 | 3.40E−36 | | | 63.61 | “GA BINDING PROTEIN | “COMPLEX (TRANSCRIPTION |
| | | | | | | | | | ALPHA; CHAIN: A; GA | REGULATION/DNA) GABPALPHA; |
| | | | | | | | | | BINDING PROTEIN BETA 1; | GABPBETA1; COMPLEX (TRANSCRIPTION |
| | | | | | | | | | CHAIN: B; DNA; CHAIN: D, | REGULATION/DNA), DNA-BINDING, 2 |
| | | | | | | | | | E;” | NUCLEAR PROTEIN, ETS DOMAIN, |
| | | | | | | | | | | ANKYRIN REPEATS, TRANSCRIPTION 3 |
| | | | | | | | | | | FACTOR” |
| 344 | 1bd8 | | 298 | 451 | 1.70E−28 | | | 63.55 | P19INK4D CDK4/6 | “TUMOR SUPPRESSOR TUMOR |
| | | | | | | | | | INHIBITOR; CHAIN: NULL; | SUPPRESSOR, CDK4/6 INHIBITOR, |
| | | | | | | | | | | ANKYRIN MOTIF” |
| 344 | 1blx | B | 298 | 451 | 1.40E−28 | | | 59.76 | CYCLIN-DEPENDENT | “COMPLEX (INHIBITOR |
| | | | | | | | | | KINASE 6; CHAIN: A; | PROTEIN/KINASE) INHIBITOR PROTEIN, |
| | | | | | | | | | P19INK4D; CHAIN: B; | CYCLIN-DEPENDENT KINASE, CELL |
| | | | | | | | | | | CYCLE 2 CONTROL, ALPHA/BETA, |
| | | | | | | | | | | COMPLEX (INHIBITOR |
| | | | | | | | | | | PROTEIN/KINASE)” |
| 344 | 1bu9 | A | 222 | 401 | 1.20E−31 | | | 60.09 | CYCLIN-DEPENDENT | “HORMONE/GROWTH FACTOR P18- |
| | | | | | | | | | KINASE 6 INHIBITOR; | INK4C; CELL CYCLE INHIBITOR, |
| | | | | | | | | | CHAIN: A; | P18INK4C, TUMOR, SUPPRESSOR, |
| | | | | | | | | | | CYCLIN-2 DEPENDENT KINASE, |
| | | | | | | | | | | HORMONE/GROWTH FACTOR” |
| 344 | 1ihb | A | 299 | 450 | 1.20E−31 | | | 62.65 | “CYCLIN-DEPENDENT | “CELL CYCLE INHIBITOR P18- |
| | | | | | | | | | KINASE 6 INHIBITOR; | INK4C(INK6); CELL CYCLE INHIBITOR, |
| | | | | | | | | | CHAIN: A, B;” | P18-INK4C(INK6), ANKYRIN REPEAT, 2 |
| | | | | | | | | | | CDK 4/6 INHIBITOR” |
| 344 | 1ikn | D | 193 | 410 | 1.70E−39 | | | 58.8 | NF-KAPPA-B P65 SUBUNIT; | “TRANSCRIPTION FACTOR P65; P50D; |
| | | | | | | | | | CHAIN: A; NF-KAPPA-B | TRANSCRIPTION FACTOR, IKB/NFKB |
| | | | | | | | | | P50D SUBUNIT; CHAIN: C; I- | COMPLEX” |
| | | | | | | | | | KAPPA-B-ALPHA; CHAIN: D; | |
| 344 | 1myo | | 336 | 451 | 1.50E−25 | | | 65.72 | MYOTROPHIN; CHAIN: | “ANK-REPEAT MYOTROPHIN, |
| | | | | | | | | | NULL | ACETYLATION, NMR, ANK-REPEAT” |
| 344 | 1nfi | E | 221 | 431 | 5.10E−39 | | | 56.51 | “NF-KAPPA-B P65; CHAIN: | “COMPLEX (TRANSCRIPTION REG/ANK |
| | | | | | | | | | A, C; NF-KAPPA-B P50; | REPEAT) COMPLEX (TRANSCRIPTION |
| | | | | | | | | | CHAIN: B, D; I-KAPPA-B- | REGULATION/ANK REPEAT), ANKYRIN 2 |
| | | | | | | | | | ALPHA; CHAIN: E, F;” | REPEAT HELIX” |
| 344 | 1sw6 | A | 142 | 412 | 1.40E−17 | | | 56.82 | “REGULATORY PROTEIN | “TRANSCRIPTION REGULATION |
| | | | | | | | | | SW16; CHAIN: A, B;” | TRANSCRIPTION REGULATION, |
| | | | | | | | | | | ANKYRIN REPEATS, CELL-CYCLE” |
| 345 | 1awc | B | 336 | 489 | 3.40E−40 | | | 99.08 | “GA BINDING PROTEIN | “COMPLEX (TRANSCRIPTION |
| | | | | | | | | | ALPHA; CHAIN: A; GA | REGULATION/DNA) GABPALPHA; |
| | | | | | | | | | BINDING PROTEIN BETA 1; | GABPBETA1; COMPLEX (TRANSCRIPTION |
| | | | | | | | | | CHAIN: B; DNA; CHAIN: D, | REGULATION/DNA), DNA-BINDING, 2 |
| | | | | | | | | | E;” | NUCLEAR PROTEIN, ETS DOMAIN, |
| | | | | | | | | | | ANKYRIN REPEATS, TRANSCRIPTION 3 |
| | | | | | | | | | | FACTOR” |
| 345 | 1bd8 | | 298 | 458 | 3.40E−30 | | | 86.24 | P19INK4D CDK4/6 | “TUMOR SUPPRESSOR TUMOR |
| | | | | | | | | | INHIBITOR; CHAIN: NULL; | SUPPRESSOR, CDK4/6 INHIBITOR, |
| | | | | | | | | | | ANKYRIN MOTIF” |
| 345 | 1blx | B | 335 | 496 | 3.40E−29 | | | 86.17 | CYCLIN-DEPENDENT | “COMPLEX (INHIBITOR |
| | | | | | | | | | KINASE 6; CHAIN: A; | PROTEIN/KINASE) INHIBITOR PROTEIN, |
| | | | | | | | | | P19INK4D; CHAIN: B; | CYCLIN-DEPENDENT KINASE, CELL |
| | | | | | | | | | | CYCLE 2 CONTROL, ALPHA/BETA, |
| | | | | | | | | | | COMPLEX (INHIBITOR |
| | | | | | | | | | | PROTEIN/KINASE)” |
| 345 | 1bu9 | A | 332 | 499 | 3.40E−36 | | | 92.28 | CYCLIN-DEPENDENT | “HORMONE/GROWTH FACTOR P18- |
| | | | | | | | | | KINASE 6 INHIBITOR; | INK4C; CELL CYCLE INHIBITOR, |
| | | | | | | | | | CHAIN: A; | P18INK4C, TUMOR, SUPPRESSOR, |
| | | | | | | | | | | CYCLIN-2 DEPENDENT KINASE, |
| | | | | | | | | | | HORMONE/GROWRH FACTOR” |
| 345 | 1ihb | A | 336 | 492 | 1.00E−36 | | | 96.92 | “CYCLIN-DEPENDENT | “CELL CYCLE INHIBITOR P18- |
| | | | | | | | | | KINASE 6 INHIBITOR; | INK4C(INK6); CELL CYCLE INHIBITOR, |
| | | | | | | | | | CHAIN: A, B;” | P18-INK4C(INK6), ANKYRIN REPEAT, 2 |
| | | | | | | | | | | CDK 4/6 INHIBITOR” |
| 345 | 1ikn | D | 330 | 543 | 5.10E−43 | | | 85.65 | NF-KAPPA-B P65 SUBUNIT; | “TRANSCRIPTION FACTOR P65; P50D; |
| | | | | | | | | | CHAIN: A; NF-KAPPA-B | TRANSCRIPTION FACTOR, IKB/NFKB |
| | | | | | | | | | P50D SUBUNIT; CHAIN: C; I- | COMPLEX” |
| | | | | | | | | | KAPPA-B-ALPHA; CHAIN: D; | |
| 345 | 1nfi | E | 329 | 540 | 3.40E−43 | | | 97.89 | “NF-KAPPA-B P65; CHAIN: | “COMPLEX (TRANSCRIPTION REG/ANK |
| | | | | | | | | | A, C; NF-KAPPA-B P50; | REPEAT) COMPLEX (TRANSCRIPTION |
| | | | | | | | | | CHAIN: B, D; I-KAPPA-B- | REGULATION/ANK REPEAT), ANKYRIN 2 |
| | | | | | | | | | ALPHA; CHAIN: E, F;” | REPEAT HELIX” |
| 347 | 1dx5 | I | 495 | 619 | 1.30E−13 | 0.35 | 0.45 | | “THROMBIN LIGHT CHAIN; | “SERINE PROTEINASE COAGULATION |
| | | | | | | | | | CHAIN: A, B, C, D; | FACTOR II; COAGULATION FACTOR II; |
| | | | | | | | | | THROMBIN HEAVY CHAIN; | FETOMODULIN, TM, CD141 ANTIGEN; |
| | | | | | | | | | CHAIN: M, N, O, P; | EGR-CMK SERINE PROTEINASE, EGF- |
| | | | | | | | | | THROMBOMODULIN; | LIKE DOMAINS, ANTICOAGULANT |
| | | | | | | | | | CHAIN: I, J, K, L; THROMBIN | COMPLEX, 2 ANTIFIBRINOLYTIC |
| | | | | | | | | | INHIBITOR L-GLU-L-GLY-L- | COMPLEX” |
| | | | | | | | | | ARM; CHAIN: E, F, G, H;” | |
| 347 | 1dx5 | I | 2067 | 2170 | 8.40E−13 | 0.54 | −0.19 | | “THROMBIN LIGHT CHAIN; | “SERINE PROTEINASE COAGULATION |
| | | | | | | | | | CHAIN: A, B, C, D; | FACTOR II; COAGULATION FACTOR II; |
| | | | | | | | | | THROMBIN HEAVY CHAIN; | FETOMODULIN, TM, CD141 ANTIGEN; |
| | | | | | | | | | CHAIN: M, N, O, P; | EGR-CMK SERINE PROTEINASE, EGF- |
| | | | | | | | | | THROMBOMODULIN; | LIKE DOMAINS, ANTICOAGULANT |
| | | | | | | | | | CHAIN: I, J, K, L; THROMBIN | COMPLEX, 2 ANTIFIBRINOLYTIC |
| | | | | | | | | | INHIBITOR L-GLU-L-GLY-L- | COMPLEX” |
| | | | | | | | | | ARM; CHAIN: E, F, G, H;” | |
| 347 | 1dx5 | I | 1831 | 1951 | 2.10E−11 | 0.07 | 0.03 | | “THROMBIN LIGHT CHAIN; | “SERINE PROTEINASE COAGULATION |
| | | | | | | | | | CHAIN: A, B, C, D; | FACTOR II; COAGULATION FACTOR II; |
| | | | | | | | | | THROMBIN HEAVY CHAIN; | FETOMODULIN, TM, CD141 ANTIGEN; |
| | | | | | | | | | CHAIN: M, N, O, P; | EGR-CMK SERINE PROTEINASE, EGF- |
| | | | | | | | | | THROMBOMODULIN; | LIKE DOMAINS, ANTICOAGULANT |
| | | | | | | | | | CHAIN: I, J, K, L; THROMBIN | COMPLEX, 2 ANTIFIBRINOLYTIC |
| | | | | | | | | | INHIBITOR L-GLU-L-GLY-L- | COMPLEX” |
| | | | | | | | | | ARM; CHAIN: E, F, G, H;” | |
| 347 | 1ext | A | 2054 | 2169 | 2.10E−13 | 0.63 | −0.14 | | “TUMOR NECROSIS | “SIGNALLING PROTEIN BINDING |
| | | | | | | | | | FACTOR RECEPTOR; | PROTEIN, CYTOKINE, SIGNALLING |
| | | | | | | | | | CHAIN: A, B;” | PROTEIN” |
| 347 | 1ext | A | 1438 | 1593 | 2.10E−13 | 0.2 | −0.08 | | “TUMOR NECROSIS | “SIGNALLING PROTEIN BINDING |
| | | | | | | | | | FACTOR RECEPTOR; | PROTEIN, CYTOKINE, SIGNALLING |
| | | | | | | | | | CHAIN: A, B;” | PROTEIN” |
| 347 | 1ext | A | 1831 | 1954 | 1.90E−12 | 0.06 | −0.06 | | “TUMOR NECROSIS | “SIGNALLING PROTEIN BINDING |
| | | | | | | | | | FACTOR RECEPTOR; | PROTEIN, CYTOKINE, SIGNALLING |
| | | | | | | | | | CHAIN: A, B;” | PROTEIN” |
| 347 | 1klo | | 1913 | 2067 | 4.20E−40 | 0.66 | 1 | | LAMININ; CHAIN: NULL; | GLYCOPROTEIN GLYCOPROTEIN |
| 347 | 1klo | | 359 | 542 | 2.10E−36 | 0.46 | 0.8 | | LAMININ; CHAIN: NULL; | GLYCOPROTEIN GLYCOPROTEIN |
| 347 | 1klo | | 494 | 632 | 6.30E−35 | 0.52 | 1 | | LAMININ; CHAIN: NULL; | GLYCOPROTEIN GLYCOPROTEIN |
| 347 | 1klo | | 300 | 471 | 4.20E−34 | 0.5 | 0.29 | | LAMININ; CHAIN: NULL; | GLYCOPROTEIN GLYCOPROTEIN |
| 347 | 1klo | | 1457 | 1627 | 4.20E−33 | 0.5 | 1 | | LAMININ; CHAIN: NULL; | GLYCOPROTEIN GLYCOPROTEIN |
| 347 | 1klo | | 429 | 587 | 6.30E−33 | 0.39 | 1 | | LAMININ; CHAIN: NULL; | GLYCOPROTEIN GLYCOPROTEIN |
| 347 | 1klo | | 2023 | 2145 | 4.20E−32 | 1.3 | 1 | | LAMININ; CHAIN: NULL; | GLYCOPROTEIN GLYCOPROTEIN |
| 347 | 1klo | | 541 | 725 | 4.20E−32 | 0.51 | 0.57 | | LAMININ; CHAIN: NULL; | GLYCOPROTEIN GLYCOPROTEIN |
| 347 | 1klo | | 1831 | 1967 | 1.70E−31 | 0.47 | 0.99 | | LAMININ; CHAIN: NULL; | GLYCOPROTEIN GLYCOPROTEIN |
| 347 | 1klo | | 632 | 826 | 6.30E−31 | 0.45 | 0.99 | | LAMININ; CHAIN: NULL; | GLYCOPROTEIN GLYCOPROTEIN |
| 347 | 1klo | | 1922 | 2060 | 3.40E−29 | 0.47 | 1 | | LAMININ; CHAIN: NULL; | GLYCOPROTEIN GLYCOPROTEIN |
| 347 | 1klo | | 1438 | 1578 | 8.40E−29 | 0.96 | 1 | | LAMININ; CHAIN: NULL; | GLYCOPROTEIN GLYCOPROTEIN |
| 347 | 1klo | | 744 | 867 | 4.20E−25 | 0.72 | 0.98 | | LAMININ; CHAIN: NULL; | GLYCOPROTEIN GLYCOPROTEIN |
| 347 | 1klo | | 677 | 825 | 3.40E−24 | 0.66 | 1 | | LAMININ; CHAIN: NULL; | GLYCOPROTEIN GLYCOPROTEIN |
| 347 | 1klo | | 725 | 867 | 3.40E−23 | 0.52 | 1 | | LAMININ; CHAIN: NULL; | GLYCOPROTEIN GLYCOPROTEIN |
| 347 | 1klo | | 1478 | 1624 | 6.80E−23 | 0.72 | 0.99 | | LAMININ; CHAIN: NULL; | GLYCOPROTEIN GLYCOPROTEIN |
| 347 | 1klo | | 587 | 724 | 1.70E−21 | 0.76 | 1 | | LAMININ; CHAIN: NULL; | GLYCOPROTEIN GLYCOPROTEIN |
| 347 | 1klo | | 1814 | 1966 | 1.00E−19 | 0.26 | 0.01 | | LAMININ; CHAIN: NULL; | GLYCOPROTEIN GLYCOPROTEIN |
| 347 | 1klo | | 1344 | 1484 | 1.20E−19 | −0.45 | 0.01 | | LAMININ; CHAIN: NULL; | GLYCOPROTEIN GLYCOPROTEIN |
| 347 | 1klo | | 1391 | 1526 | 5.10E−19 | 0.05 | 0.43 | | LAMININ; CHAIN: NULL; | GLYCOPROTEIN GLYCOPROTEIN |
| 347 | 1klo | | 293 | 417 | 1.10E−16 | 0.22 | 0.46 | | LAMININ; CHAIN: NULL; | GLYCOPROTEIN GLYCOPROTEIN |
| 347 | 1klo | | 1913 | 2069 | 4.20E−40 | | | 157.87 | LAMININ; CHAIN: NULL; | GLYCOPROTEIN GLYCOPROTEIN |
| 347 | 1pp2 | R | 1831 | 1949 | 1.30E−11 | 0.04 | −0.18 | | | HYDROLASE CALCIUM-FREE |
| | | | | | | | | | | PHOSPHOLIPASE A = 2 = (E.C.3.1.1.4) 1PP2 4 |
| 347 | 1pp2 | R | 394 | 527 | 2.10E−10 | 0.22 | −0.18 | | | HYDROLASE CALCIUM-FREE |
| | | | | | | | | | | PHOSPHOLIPASE A = 2 = (E.C.3.1.1.4) 1PP2 4 |
| 347 | 1qfk | L | 584 | 699 | 2.10E−15 | 0.35 | −0.05 | | COAGULATION FACTOR | “SERINE PROTEASE FVIIA; FVIIA; BLOOD |
| | | | | | | | | | VIIA (LIGHT CHAIN); | COAGULATION, SERINE PROTEASE” |
| | | | | | | | | | CHAIN: L; COAGULATION | |
| | | | | | | | | | FACTOR VIIA (HEAVY | |
| | | | | | | | | | CHAIN); CHAIN: H; | |
| | | | | | | | | | TRIPEPTIDYL INHIBITOR; | |
| | | | | | | | | | CHAIN: C; | |
| 347 | 1qfk | L | 1437 | 1534 | 1.30E−08 | 0.05 | −0.07 | | COAGULATION FACTOR | “SERINE PROTEASE FVIIA; FVIIA; BLOOD |
| | | | | | | | | | VIIA (LIGHT CHAIN); | COAGULATION, SERINE PROTEASE” |
| | | | | | | | | | CHAIN: L; COAGULATION | |
| | | | | | | | | | FACTOR VIIA (HEAVY | |
| | | | | | | | | | CHAIN); CHAIN: H; | |
| | | | | | | | | | TRIPEPTIDYL INHIBITOR; | |
| | | | | | | | | | CHAIN: C; | |
| 347 | 1qu0 | A | 3516 | 3688 | 1.50E−25 | 0.76 | 0.3 | | “LAMININ ALPHA2 CHAIN; | “METAL BINDING PROTEIN BETA |
| | | | | | | | | | CHAIN: A, B, C, D;” | SANDWICH, CALCIUM-BINDING |
| | | | | | | | | | | PROTEIN, METAL BINDING 2 PROTEIN” |
| 347 | 1qu0 | A | 3338 | 3496 | 2.10E−15 | 0.85 | 0.77 | | “LAMININ ALPHA2 CHAIN; | “METAL BINDING PROTEIN BETA |
| | | | | | | | | | CHAIN: A, B, C, D;” | SANDWICH, CALCIUM-BINDING |
| | | | | | | | | | | PROTEIN, METAL BINDING 2 PROTEIN” |
| 347 | 1qu0 | A | 3124 | 3281 | 1.50E−08 | 0.8 | 0.99 | | “LAMININ ALPHA2 CHAIN; | “METAL BINDING PROTEIN BETA |
| | | | | | | | | | CHAIN: A, B, C, D;” | SANDWICH, CALCIUM-BINDING |
| | | | | | | | | | | PROTEIN, METAL BINDING 2 PROTEIN” |
| 347 | 1quu | A | 2204 | 2457 | 1.30E−09 | 0.12 | −0.03 | | HUMAN SKELETAL | “CONTRACTILE PROTEIN TRIPLE-HELIX |
| | | | | | | | | | MUSCLE ALPHA-ACTININ 2; | COILED COIL, CONTRACTILE PROTEIN” |
| | | | | | | | | | CHAIN: A; | |
| 347 | 1skz | | 1966 | 2074 | 1.30E−20 | 0.23 | −0.09 | | ANTISTASIN; CHAIN: NULL; | “SERINE PROTEASE INHIBITOR FACTOR |
| | | | | | | | | | | XA INHIBITOR; ANTISTASIN, CRYSTAL |
| | | | | | | | | | | STRUCTURE, FACTOR XA INHIBITOR, 2 |
| | | | | | | | | | | SERINE PROTEASE INHIBITOR, |
| | | | | | | | | | | THROMBOSIS” |
| 347 | 1skz | | 2066 | 2168 | 4.20E−19 | 0.61 | 0.19 | | ANTISTASIN; CHAIN: NULL; | “SERINE PROTEASE INHIBITOR FACTOR |
| | | | | | | | | | | XA INHIBITOR; ANTISTASIN, CRYSTAL |
| | | | | | | | | | | STRUCTURE, FACTOR XA INHIBITOR, 2 |
| | | | | | | | | | | SERINE PROTEASE INHIBITOR, |
| | | | | | | | | | | THROMBOSIS” |
| 347 | 1skz | | 426 | 543 | 1.30E−14 | −0.04 | 0.11 | | ANTISTASIN; CHAIN: NULL; | “SERINE PROTEASE INHIBITOR FACTOR |
| | | | | | | | | | | XA INHIBITOR; ANTISTASIN, CRYSTAL |
| | | | | | | | | | | STRUCTURE, FACTOR XA INHIBITOR, 2 |
| | | | | | | | | | | SERINE PROTEASE INHIBITOR, |
| | | | | | | | | | | THROMBOSIS” |
| 347 | 1skz | | 772 | 872 | 2.10E−14 | 0 | −0.03 | | ANTISTASIN; CHAIN: NULL; | “SERINE PROTEASE INHIBITOR FACTOR |
| | | | | | | | | | | XA INHIBITOR; ANTISTASIN, CRYSTAL |
| | | | | | | | | | | STRUCTURE, FACTOR XA INHIBITOR, 2 |
| | | | | | | | | | | SERINE PROTEASE INHIBITOR, |
| | | | | | | | | | | THROMBOSIS” |
| 347 | 1skz | | 1481 | 1591 | 6.30E−14 | 0.33 | 0.53 | | ANTISTASIN; CHAIN: NULL; | “SERINE PROTEASE INHIBITOR FACTOR |
| | | | | | | | | | | XA INHIBITOR; ANTISTASIN, CRYSTAL |
| | | | | | | | | | | STRUCTURE, FACTOR XA INHIBITOR, 2 |
| | | | | | | | | | | SERINE PROTEASE INHIBITOR, |
| | | | | | | | | | | THROMBOSIS” |
| 347 | 1tle | | 357 | 429 | 1.30E−14 | 0.41 | −0.11 | | LAMININ; CHAIN: NULL; | “GLYCOPROTEIN LAMININ-TYPE EGF- |
| | | | | | | | | | | LIKE; GLYCOPROTEIN, EXTRACELLULAR |
| | | | | | | | | | | MATRIX PROTEIN, NIDOGEN BINDING, 2 |
| | | | | | | | | | | LE-MODULE” |
| 347 | 1tle | | 1575 | 1628 | 1.30E−12 | 0.03 | 0.89 | | LAMININ; CHAIN: NULL; | “GLYCOPROTEIN LAMININ-TYPE EGF- |
| | | | | | | | | | | LIKE; GLYCOPROTEIN, EXTRACELLULAR |
| | | | | | | | | | | MATRIX PROTEIN, NIDOGEN BINDING, 2 |
| | | | | | | | | | | LE-MODULE” |
| 347 | 1tpg | | 603 | 711 | 1.90E−21 | 0.44 | −0.15 | | T-PLASMINOGEN | PLASMINOGEN ACTIVATION |
| | | | | | | | | | ACTIVATOR F1-G; 1TPG 7 | |
| | | | | | | | | | CHAIN: NULL; 1TPG 8 | |
| 347 | 1tpg | | 2037 | 2145 | 2.10E−21 | 0.54 | 0.09 | | T-PLASMINOGEN | PLASMINOGEN ACTIVATION |
| | | | | | | | | | ACTIVATOR F1-G; 1TPG 7 | |
| | | | | | | | | | CHAIN: NULL; 1TPG 8 | |
| 347 | 1tpg | | 525 | 619 | 2.10E−20 | 0.49 | −0.13 | | T-PLASMINOGEN | PLASMINOGEN ACTIVATION |
| | | | | | | | | | ACTIVATOR F1-G; 1TPG 7 | |
| | | | | | | | | | CHAIN: NULL; 1TPG 8 | |
| 347 | 1tpg | | 757 | 864 | 6.30E−15 | 0.29 | 0.3 | | T-PLASMINOGEN | PLASMINOGEN ACTIVATION |
| | | | | | | | | | ACTIVATOR F1-G; 1TPG 7 | |
| | | | | | | | | | CHAIN: NULL; 1TPG 8 | |
| 347 | 9wga | A | 2085 | 2249 | 6.80E−14 | 0.04 | −0.2 | | | LECTIN (AGGLUTININ) WHEAT GERM |
| | | | | | | | | | | AGGLUTININ (ISOLECTIN 2) 9WGA 3 |
| 347 | 9wga | A | 45 | 179 | 1.40E−12 | 0.04 | −0.19 | | | LECTIN (AGGLUTININ) WHEAT GERM |
| | | | | | | | | | | AGGLUTININ (ISOLECTIN 2) 9WGA 3 |
| 347 | 9wga | A | 343 | 492 | 1.70E−11 | 0.11 | −0.17 | | | LECTIN (AGGLUTININ) WHEAT GERM |
| | | | | | | | | | | AGGLUTININ (ISOLECTIN 2) 9WGA 3 |
| 347 | 9wga | A | 3062 | 3225 | 1.40E−10 | 0.08 | −0.19 | | | LECTIN (AGGLUTININ) WHEAT GERM |
| | | | | | | | | | | AGGLUTININ (ISOLECTIN 2) 9WGA 3 |
| 349 | 1a06 | | 4 | 268 | 5.10E−86 | | | 106.26 | CALCIUM/CALMODULIN- | “KINASE KINASE, SIGNAL |
| | | | | | | | | | DEPENDENT PROTEIN | TRANSDUCTION, |
| | | | | | | | | | KINASE; CHAIN: NULL; | CALCIUM/CALMODULIN” |
| 349 | 1a6o | | 1 | 268 | 6.80E−45 | | | 61.59 | PROTEIN KINASE | “TRANSFERASE TRANSFERASE, |
| | | | | | | | | | CK2/ALPHA-SUBUNIT; | SERINE/THREONINE-PROTEIN KINASE, |
| | | | | | | | | | CHAIN: NULL; | CASEIN KINASE, 2 SER/THR KINASE” |
| 349 | 1apm | E | 1 | 268 | 1.70E−96 | | | 87.78 | | “TRANSFERASE(PHOSPHOTRANSFERASE) |
| | | | | | | | | | | $C-/AMP$-DEPENDENT PROTEIN |
| | | | | | | | | | | KINASE (E.C.2.7.1.37) ($C/APK$) 1APM 3 |
| | | | | | | | | | | (CATALYTIC SUBUNIT) ““ALPHA”” |
| | | | | | | | | | | ISOENZYME MUTANT WITH SER 139 |
| | | | | | | | | | | 1APM 4 REPLACED BY ALA (/S139A$) |
| | | | | | | | | | | COMPLEX WITH THE PEPTIDE 1APM 5 |
| | | | | | | | | | | INHIBITOR PKI(5-24) AND THE |
| | | | | | | | | | | DETERGENT MEGA-8 1APM 6” |
| 349 | 1aq1 | | 7 | 268 | 6.80E−58 | | | 76.79 | CYCLIN-DEPENDENT | “PROTEIN KINASE CDK2; PROTEIN |
| | | | | | | | | | PROTEIN KINASE 2; CHAIN: | KINASE, CELL CYCLE, |
| | | | | | | | | | NULL; | PHOSPHORYLATION, STAUROSPORINE, 2 |
| | | | | | | | | | | CELL DIVISION, MITOSIS, INHIBITION” |
| 349 | 1bi8 | A | 8 | 266 | 4.20E−45 | | | 67.07 | “CYCLIN-DEPENDENT | “COMPLEX (KINASE/INHIBITOR) CDK6; |
| | | | | | | | | | KINASE 6; CHAIN: A, C; | P19INK4D; CYCLIN DEPENDENT KINASE, |
| | | | | | | | | | CYCLIN-DEPENDENT | CYCLIN DEPENDENT KINASE |
| | | | | | | | | | KINASE INHIBITOR; CHAIN: | INHIBITORY 2 PROTEIN, CDK, INK4, CELL |
| | | | | | | | | | B, D;” | CYCLE, COMPLEX (KINASE/INHIBITOR) |
| | | | | | | | | | | HEADER HELIX” |
| 349 | 1blx | A | 3 | 268 | 6.80E−49 | | | 74.28 | CYCLIN-DEPENDENT | “COMPLEX (INHIBITOR |
| | | | | | | | | | KINASE 6; CHAIN: A; | PROTEIN/KINASE) INHIBITOR PROTEIN, |
| | | | | | | | | | P19INK4D; CHAIN: B; | CYCLIN-DEPENDENT KINASE, CELL |
| | | | | | | | | | | CYCLE 2 CONTROL, ALPHA/BETA, |
| | | | | | | | | | | COMPLEX (INHIBITOR |
| | | | | | | | | | | PROTEIN/KINASE)” |
| 349 | 1byg | A | 5 | 264 | 5.10E−35 | | | 75.19 | C-TERMINAL SRC KINASE; | “TRANSFERASE CSK; PROTEIN KINASE, |
| | | | | | | | | | CHAIN: A; | C-TERMINAL SRC KINASE, |
| | | | | | | | | | | PHOSPHORYLATION, 2 STAUROSPORINE, |
| | | | | | | | | | | TRANSFERASE” |
| 349 | 1cki | A | 2 | 268 | 1.70E−23 | | | 64.03 | “CASEIN KINASE I DELTA; | PHOSPHOTRANSFERASE PROTEIN |
| | | | | | | | | | 1CKI 6 CHAIN: A, B; 1CKI 7” | KINASE 1CKI 18 |
| 349 | 1cmk | E | 1 | 268 | 1.70E−97 | | | 83.18 | | PHOSPHOTRANSFERASE CAMP- |
| | | | | | | | | | | DEPENDENT PROTEIN KINASE |
| | | | | | | | | | | CATALYTIC SUBUNIT 1CMK 3 |
| | | | | | | | | | | (E.C.2.7.1.37) 1CMK 4 |
| 349 | 1csn | | 5 | 267 | 1.40E−52 | | | 56.94 | CASEIN KINASE-1; 1CSN 4 | PHOSPHOTRANSFERASE |
| 349 | 1ctp | E | 1 | 268 | 1.70E−97 | | | 91.57 | | TRANSFERASE(PHOSPHOTRANSFERASE) |
| | | | | | | | | | | CAMP-DEPENDENT PROTEIN KINASE |
| | | | | | | | | | | (E.C.2.7.1.37) (CAPK) 1CTP 3 (CATALYTIC |
| | | | | | | | | | | SUBUNIT) 1CTP 4 |
| 349 | 1fgk | B | 2 | 268 | 1.50E−41 | | | 85.3 | “FGF RECEPTOR 1; CHAIN: | “PHOSPHOTRANSFERASE FGFR1K, |
| | | | | | | | | | A, B;” | FIBROBLAST GROWTH FACTOR |
| | | | | | | | | | | RECEPTOR 1; TRANSFERASE, TYROSINE- |
| | | | | | | | | | | PROTEIN KINASE, ATP-BINDING, 2 |
| | | | | | | | | | | PHOSPHORYLATION, RECEPTOR, |
| | | | | | | | | | | PHOSPHOTRANSFERASE” |
| 349 | 1fgk | A | 5 | 268 | 6.80E−35 | | | 79.66 | “FGF RECEPTOR 1; CHAIN: | “PHOSPHOTRANSFERASE FGFR1K, |
| | | | | | | | | | A, B;” | FIBROBLAST GROWTH FACTOR |
| | | | | | | | | | | RECEPTOR 1; TRANSFERASE, TYROSINE- |
| | | | | | | | | | | PROTEIN KINASE, ATP-BINDING, 2 |
| | | | | | | | | | | PHOSPHORYLATION, RECEPTOR, |
| | | | | | | | | | | PHOSPHOTRANSFERASE” |
| 349 | 1hcl | | 7 | 268 | 8.50E−62 | | | 100.67 | HUMAN CYCLIN- | “PROTEIN KINASE CDK2; TRANSFERASE, |
| | | | | | | | | | DEPENDENT KINASE 2; | SERINE/THREONINE PROTEIN KINASE, |
| | | | | | | | | | CHAIN: NULL; | ATP-BINDING, 2 CELL CYCLE, CELL |
| | | | | | | | | | | DIVISION, MITOSIS, PHOSPHORYLATION” |
| 349 | 1ir3 | A | 2 | 268 | 5.10E−30 | | | 76.94 | INSULIN RECEPTOR; | “COMPLEX (TRANSFERASE/SUBSTRATE) |
| | | | | | | | | | CHAIN: A; PEPTIDE | TYROSINE KINASE, SIGNAL |
| | | | | | | | | | SUBSTRATE; CHAIN: B; | TRANSDUCTION, |
| | | | | | | | | | | PHOSPHOTRANSFERASE, 2 COMPLEX |
| | | | | | | | | | | (KINASE/PEPTIDE SUBSTRATE/ATP |
| | | | | | | | | | | ANALOG), ENZYME, 3 COMPLEX |
| | | | | | | | | | | (TRANSFERASE/SUBSTRATE)” |
| 349 | 1jnk | | 2 | 267 | 1.70E−46 | | | 61.32 | C-JUN N-TERMINAL | “TRANSFERASE JNK3; TRANSFERASE, |
| | | | | | | | | | KINASE; CHAIN: NULL; | JNK3 MAP KINASE, SERINE/THREONINE |
| | | | | | | | | | | PROTEIN 2 KINASE” |
| 349 | 1kob | A | 1 | 268 | 1.70E−76 | | | 72.77 | “TWITCHIN; CHAIN: A, B;” | “KINASE KINASE, TWITCHIN, |
| | | | | | | | | | | INTRASTERIC REGULATION” |
| 349 | 1p38 | | 4 | 268 | 7.00E−52 | | | 61.55 | MAP KINASE P38; CHAIN: | “TRANSFERASE MITOGEN ACTIVATED |
| | | | | | | | | | NULL; | PROTEIN KINASE; TRANSFERASE, MAP |
| | | | | | | | | | | KINASE, SERINE/THREONINE-PROTEIN |
| | | | | | | | | | | KINASE, 2 P38” |
| 349 | 1phk | | 6 | 268 | 1.70E−84 | | | 135.19 | PHOSPHORYLASE KINASE; | “KINASE RABBIT MUSCLE |
| | | | | | | | | | CHAIN: NULL; | PHOSPHORYLASE KINASE; GLYCOGEN |
| | | | | | | | | | | METABOLISM, TRANSFERASE, |
| | | | | | | | | | | SERINE/THREONINE-PROTEIN, 2 KINASE, |
| | | | | | | | | | | ATP-BINDING, CALMODULIN-BINDING” |
| 349 | 1pme | | 9 | 268 | 1.00E−48 | | | 74.13 | ERK2; CHAIN: NULL; | “TRANSFERASE MAP KINASE, |
| | | | | | | | | | | SERINE/THREONINE PROTEIN KINASE, |
| | | | | | | | | | | TRANSFERASE” |
| 349 | 1tki | A | 6 | 268 | 3.40E−60 | | | 79.78 | “TITIN; CHAIN: A, B;” | “SERINE KINASE SERINE KINASE, TITIN, |
| | | | | | | | | | | MUSCLE, AUTOINHIBITION” |
| 349 | 3erk | | 2 | 268 | 1.40E−58 | | | 69.09 | EXTRACELLULAR | “TRANSFERASE MITOGEN ACTIVATED |
| | | | | | | | | | REGULATED KINASE 2; | PROTEIN KINASE, MAP 2, ERK2; |
| | | | | | | | | | CHAIN: NULL; | TRANSFERASE, SERINE/THREONINE- |
| | | | | | | | | | | PROTEIN KINASE, MAP KINASE, 2 ERK2” |
| 353 | 1got | B | 24 | 330 | 5.10E−39 | | | 90.99 | GT-ALPHA/GI-ALPHA | “COMPLEX (GTP-BINDING/TRANSDUCER) |
| | | | | | | | | | CHIMERA; CHAIN: A; GT- | BETA1, TRANSDUCIN BETA SUBUNIT; |
| | | | | | | | | | BETA; CHAIN: B; GT- | GAMMA1, TRANSDUCIN GAMMA |
| | | | | | | | | | GAMMA; CHAIN: G; | SUBUNIT; COMPLEX (GTP- |
| | | | | | | | | | | BINDING/TRANSDUCER), G PROTEIN, |
| | | | | | | | | | | HETEROTRIMER 2 SIGNAL |
| | | | | | | | | | | TRANSDUCTION” |
| 358 | 1dqv | A | 297 | 571 | 4.20E−98 | 0.84 | 1 | | SYNAPTOTAGMIN III; | “ENDOCYTOSIS/EXOCYTOSIS BETA |
| | | | | | | | | | CHAIN: A; | SANDWICH, CALCIUM ION, C2 DOMAIN” |
| 358 | 1dqv | A | 299 | 570 | 6.80E−69 | 0.8 | 1 | | SYNAPTOTAGMIN III; | “ENDOCYTOSIS/EXOCYTOSIS BETA |
| | | | | | | | | | CHAIN: A; | SANDWICH, CALCIUM ION, C2 DOMAIN” |
| 358 | 1rsy | | 290 | 422 | 1.10E−38 | 0.56 | 1 | | | CALCIUM/PHOSPHOLIPID BINDING |
| | | | | | | | | | | PROTEIN SYNAPTOTAGMIN I (FIRST C2 |
| | | | | | | | | | | DOMAIN) (CALB) 1RSY 3 |
| 358 | 1rsy | | 290 | 425 | 1.10E−38 | | | 122.85 | | CALCIUM/PHOSPHOLIPID BINDING |
| | | | | | | | | | | PROTEIN SYNAPTOTAGMIN I (FIRST C2 |
| | | | | | | | | | | DOMAIN) (CALB) 1RSY 3 |
| 359 | 1a06 | | 370 | 689 | 6.80E−80 | | | 117.24 | CALCIUM/CALMODULIN- | “KINASE KINASE, SIGNAL |
| | | | | | | | | | DEPENDENT PROTEIN | TRANSDUCTION, |
| | | | | | | | | | KINASE; CHAIN: NULL; | CALCIUM/CALMODULIN” |
| 359 | 1apm | E | 352 | 703 | 0 | | | 256.47 | | “TRANSFERASE(PHOSPHOTRANSFERASE) |
| | | | | | | | | | | $C-/AMP$-DEPENDENT PROTEIN |
| | | | | | | | | | | KINASE (E.C.2.7.1.37) ($C/APK$) 1APM 3 |
| | | | | | | | | | | (CATALYTIC SUBUNIT) ““ALPHA”” |
| | | | | | | | | | | ISOENZYME MUTANT WITH SER 139 |
| | | | | | | | | | | 1APM 4 REPLACED BY ALA (/S139A$) |
| | | | | | | | | | | COMPLEX WITH THE PEPTIDE 1APM 5 |
| | | | | | | | | | | INHIBITOR PKI(5-24) AND THE |
| | | | | | | | | | | DETERGENT MEGA-8 1APM 6” |
| 359 | 1blx | A | 371 | 677 | 2.80E−55 | | | 134.02 | CYCLIN-DEPENDENT | “COMPLEX (INHIBITOR |
| | | | | | | | | | KINASE 6; CHAIN: A; | PROTEIN/KINASE) INHIBITOR PROTEIN, |
| | | | | | | | | | P19INK4D; CHAIN: B; | CYCLIN-DEPENDENT KINASE, CELL |
| | | | | | | | | | | CYCLE 2 CONTROL, ALPHA/BETA, |
| | | | | | | | | | | COMPLEX (INHIBITOR |
| | | | | | | | | | | PROTEIN/KINASE)” |
| 359 | 1cmk | E | 342 | 703 | 0 | | | 257.02 | | PHOSPHOTRANSFERASE CAMP- |
| | | | | | | | | | | DEPENDENT PROTEIN KINASE |
| | | | | | | | | | | CATALYTIC SUBUNIT 1CMK 3 |
| | | | | | | | | | | (E.C.2.7.1.37) 1CMK 4 |
| 359 | 1ctp | E | 348 | 690 | 0 | | | 247.27 | | TRANSFERASE(PHOSPHOTRANSFERASE) |
| | | | | | | | | | | CAMP-DEPENDENT PROTEIN KINASE |
| | | | | | | | | | | (E.C.2.7.1.37) (CAPK) 1CTP 3 (CATALYTIC |
| | | | | | | | | | | SUBUNIT) 1CTP 4 |
| 359 | 1hcl | | 376 | 673 | 1.40E−51 | | | 120.13 | HUMAN CYCLIN- | “PROTEIN KINASE CDK2; TRANSFERASE, |
| | | | | | | | | | DEPENDENT KINASE 2; | SERINE/THREONINE PROTEIN KINASE, |
| | | | | | | | | | CHAIN: NULL; | ATP-BINDING, 2 CELL CYCLE, CELL |
| | | | | | | | | | | DIVISION, MITOSIS, PHOSPHORYLATION” |
| 359 | 1kob | A | 349 | 727 | 8.50E−64 | | | 129.51 | “TWITCHIN; CHAIN: A, B;” | “KINASE KINASE, TWITCHIN, |
| | | | | | | | | | | INTRASTERIC REGULATION” |
| 359 | 1phk | | 377 | 655 | 3.40E−73 | | | 129.95 | PHOSPHORYLASE KINASE; | “KINASE RABBIT MUSCLE |
| | | | | | | | | | CHAIN: NULL; | PHOSPHORYLASE KINASE; GLYCOGEN |
| | | | | | | | | | | METABOLISM, TRANSFERASE, |
| | | | | | | | | | | SERINE/THREONINE-PROTEIN, 2 KINASE, |
| | | | | | | | | | | ATP-BINDING, CALMODULIN-BINDING” |
| 359 | 3erk | | 362 | 730 | 1.40E−51 | | | 123.05 | EXTRACELLULAR | “TRANSFERASE MITOGEN ACTIVATED |
| | | | | | | | | | REGULATED KINASE 2; | PROTEIN KINASE, MAP 2, ERK2; |
| | | | | | | | | | CHAIN: NULL; | TRANSFERASE, SERINE/THREONINE- |
| | | | | | | | | | | PROTEIN KINASE, MAP KINASE, 2 ERK2” |
| 362 | 1got | B | 1 | 328 | 5.10E−79 | | | 97.07 | GT-ALPHA/GI-ALPHA | “COMPLEX (GTP-BINDING/TRANSDUCER) |
| | | | | | | | | | CHIMERA; CHAIN: A; GT- | BETA1, TRANSDUCIN BETA SUBUNIT; |
| | | | | | | | | | BETA; CHAIN: B; GT- | GAMMA1, TRANSDUCIN GAMMA |
| | | | | | | | | | GAMMA; CHAIN: G; | SUBUNIT; COMPLEX (GTP- |
| | | | | | | | | | | BINDING/TRANSDUCER), G PROTEIN, |
| | | | | | | | | | | HETEROTRIMER 2 SIGNAL |
| | | | | | | | | | | TRANSDUCTION” |
| 366 | 1aox | A | 607 | 812 | 1.50E−44 | 0.54 | 1 | | “INTEGRIN ALPHA 2 BETA; | “INTEGRIN INTEGRIN, CELL ADHESION, |
| | | | | | | | | | CHAIN: A, B;” | GLYCOPROTEIN” |
| 366 | 1atz | A | 614 | 794 | 1.50E−25 | 0.43 | 1 | | “VON WILLEBRAND | “COLLAGEN-BINDING COLLAGEN- |
| | | | | | | | | | FACTOR; CHAIN: A, B;” | BINDING, HEMOSTASIS, DINUCLEOTIDE |
| | | | | | | | | | | BINDING FOLD” |
| 366 | 1atz | A | 612 | 776 | 5.10E−20 | 0.21 | 1 | | “VON WILLEBRAND | “COLLAGEN-BINDING COLLAGEN- |
| | | | | | | | | | FACTOR; CHAIN: A, B;” | BINDING, HEMOSTASIS, DINUCLEOTIDE |
| | | | | | | | | | | BINDING FOLD” |
| 366 | 1atz | A | 44 | 210 | 2.10E−07 | 0.59 | 0.9 | | “VON WILLEBRAND | “COLLAGEN-BINDING COLLAGEN- |
| | | | | | | | | | FACTOR; CHAIN: A, B;” | BINDING, HEMOSTASIS, DINUCLEOTIDE |
| | | | | | | | | | | BINDING FOLD” |
| 366 | 1auq | | 603 | 820 | 3.40E−65 | 0.44 | 0.96 | | A1 DOMAIN OF VON | “WILLEBRAND WILLEBRAND, BLOOD |
| | | | | | | | | | WILLEBRAND FACTOR; | COAGULATION, PLATELET, |
| | | | | | | | | | CHAIN: NULL; | GLYCOPROTEIN” |
| 366 | 1auq | | 37 | 228 | 1.50E−06 | 0.28 | 0.86 | | A1 DOMAIN OF VON | “WILLEBRAND WILLEBRAND, BLOOD |
| | | | | | | | | | WILLEBRAND FACTOR; | COAGULATION, PLATELET, |
| | | | | | | | | | CHAIN: NULL; | GLYCOPROTEIN” |
| 366 | 1ck4 | A | 614 | 807 | 6.80E−47 | 0.6 | 1 | | “INTEGRIN ALPHA-1; | “STRUCTURAL PROTEIN I-DOMAIN, |
| | | | | | | | | | CHAIN: A, B;” | METAL BINDING, COLLAGEN, |
| | | | | | | | | | | ADHESION” |
| 366 | 1ck4 | A | 44 | 243 | 1.70E−11 | 0.62 | 1 | | “INTEGRIN ALPHA-1; | “STRUCTURAL PROTEIN I-DOMAIN, |
| | | | | | | | | | CHAIN: A, B;” | METAL BINDING, COLLAGEN, |
| | | | | | | | | | | ADHESION” |
| 366 | 1fns | A | 611 | 817 | 1.00E−62 | 0.3 | 1 | | IMMUNOGLOBULIN NMC-4 | “IMMUNE SYSTEM VON WILLEBRAND |
| | | | | | | | | | IGG1; CHAIN: L; | FACTOR, GLYCOPROTEIN IBA (A: ALPHA) |
| | | | | | | | | | IMMUNOGLOBULIN NMC-4 | BINDING, 2 COMPLEX |
| | | | | | | | | | IGG1; CHAIN: H; VON | (WILLEBRAND/IMMUNOGLOBULIN), |
| | | | | | | | | | WILLEBRAND FACTOR; | BLOOD COAGULATION TYPE 3 2B VON |
| | | | | | | | | | CHAIN: A; | WILLEBRAND DISEASE” |
| 366 | 1ido | | 615 | 804 | 3.40E−49 | 0.3 | 1 | | INTEGRIN; CHAIN: NULL; | “CELL ADHESION PROTEIN A-DOMAIN |
| | | | | | | | | | | INTEGRIN, CELL ADHESION PROTEIN, |
| | | | | | | | | | | GLYCOPROTEIN, EXTRACELLULAR 2 |
| | | | | | | | | | | MATRIX, CYTOSKELETON” |
| 366 | 1kap | P | 313 | 549 | 4.20E−12 | 1.16 | −0.18 | | ALKALINE PROTEASE; | ZINC METALLOPROTEASE P. |
| | | | | | | | | | 1KAP 4 CHAIN: P; 1KAP 5 | AERUGINOSA ALKALINE PROTEASE; |
| | | | | | | | | | TETRAPEPTIDE (GLY SER | 1KAP 6 CALCIUM BINDING PROTEIN |
| | | | | | | | | | ASN SER); 1KAP 9 CHAIN: I; | 1KAP 19 |
| | | | | | | | | | 1KAP 10 | |
| 366 | 1kap | P | 256 | 514 | 2.10E−11 | 1.18 | −0.19 | | ALKALINE PROTEASE; | ZINC METALLOPROTEASE P. |
| | | | | | | | | | 1KAP 4 CHAIN: P; 1KAP 5 | AERUGINOSA ALKALINE PROTEASE; |
| | | | | | | | | | TETRAPEPTIDE (GLY SER | 1KAP 6 CALCIUM BINDING PROTEIN |
| | | | | | | | | | ASN SER); 1KAP 9 CHAIN: I; | 1KAP 19 |
| | | | | | | | | | 1KAP 10 | |
| 366 | 1lfa | A | 612 | 809 | 3.40E−44 | 0.48 | 1 | | “CD11A; 1LFA 5 CHAIN: A, | “CELL ADHESION LFA-1, ALPHA-L\, BETA- |
| | | | | | | | | | B; 1LFA 6” | 2 INTEGRIN, A-DOMAIN; 1LFA 8” |
| 366 | 1lfa | A | 44 | 234 | 2.10E−09 | 0.51 | 0.98 | | “CD11A; 1LFA 5 CHAIN: A, | “CELL ADHESION LFA-1, ALPHA-L\, BETA- |
| | | | | | | | | | B; 1LFA 6” | 2 INTEGRIN, A-DOMAIN; 1LFA 8” |
| 366 | 1osm | A | 256 | 585 | 2.10E−29 | 1.08 | −0.2 | | “OMPK36; CHAIN: A, B, C;” | “OUTER MEMBRANE PROTEIN |
| | | | | | | | | | | OSMOPORIN; OUTER MEMBRANE |
| | | | | | | | | | | PROTEIN, NON-SPECIFIC PORIN, |
| | | | | | | | | | | OSMOPORIN, 2 BETA-BARREL, |
| | | | | | | | | | | TRANSMEMBRANE” |
| 366 | 1qc5 | A | 614 | 805 | 1.70E−45 | 0.75 | 1 | | ALPHA1 BETA1 INTEGRIN; | “CELL ADHESION INTEGRIN, CELL |
| | | | | | | | | | CHAIN: A; ALPHA1 BETA1 | ADHESION” |
| | | | | | | | | | INTEGRIN; CHAIN: B; | |
| 366 | 1qc5 | A | 44 | 236 | 1.00E−11 | 0.56 | 1 | | ALPHA1 BETA1 INTEGRIN; | “CELL ADHESION INTEGRIN, CELL |
| | | | | | | | | | CHAIN: A; ALPHA1 BETA1 | ADHESION” |
| | | | | | | | | | INTEGRIN; CHAIN: B; | |
| 366 | 2omf | | 256 | 570 | 2.10E−22 | 1.2 | −0.2 | | MATRIX PORIN OUTER | “INTEGRAL MEMBRANE PROTEIN PORIN |
| | | | | | | | | | MEMBRANE PROTEIN F; | MATRIX PORIN, OMPF PORIN; 2OMF 7 |
| | | | | | | | | | 2OMF 5 CHAIN: NULL; | PORIN, MEMBRANE PROTEIN 2OMF 12” |
| | | | | | | | | | 2OMF 6 | |
| 366 | 2omf | | 361 | 588 | 8.40E−15 | 1.07 | −0.2 | | MATRIX PORIN OUTER | “INTEGRAL MEMBRANE PROTEIN PORIN |
| | | | | | | | | | MEMBRANE PROTEIN F; | MATRIX PORIN, OMPF PORIN; 2OMF 7 |
| | | | | | | | | | 2OMF 5 CHAIN: NULL; | PORIN, MEMBRANE PROTEIN 2OMF 12” |
| | | | | | | | | | 2OMF 6 | |
| 368 | 1faO | A | 89 | 177 | 2.80E−13 | 0.22 | 0.64 | | DUAL ADAPTOR OF | “SIGNALING PROTEIN DAPP1, PHISH, |
| | | | | | | | | | PHOSPHOTYROSINE AND 3- | BAM32; PLECKSTRIN, 3- |
| | | | | | | | | | CHAIN: A; | PHOSPHOINOSITIDES, INOSITOL |
| | | | | | | | | | | TETRAKISPHOSPHATE 2 SIGNAL |
| | | | | | | | | | | TRANSDUCTION PROTEIN, ADAPTOR |
| | | | | | | | | | | PROTEIN” |
| 368 | 1fb8 | A | 90 | 177 | 5.60E−14 | 0.21 | 0.8 | | DUAL ADAPTOR OF | “SIGNALING PROTEIN DAPP1, PHISH, |
| | | | | | | | | | PHOSPHOTYROSINE AND 3- | BAM32; PLECKSTRIN, 3- |
| | | | | | | | | | CHAIN: A; | PHOSPHOINOSITIDES, INOSITOL |
| | | | | | | | | | | TETRAKISPHOSPHATE 2 SIGNAL |
| | | | | | | | | | | TRANSDUCTION PROTEIN, ADAPTOR |
| | | | | | | | | | | PROTEIN” |
| 368 | 1pls | | 89 | 177 | 7.00E−11 | 0.2 | 0 | | | “PHOSPHORYLATION PLECKSTRIN (N- |
| | | | | | | | | | | TERMINAL PLECKSTRIN HOMOLOGY |
| | | | | | | | | | | DOMAIN) MUTANT 1PLS 3 WITH LEU GLU |
| | | | | | | | | | | (HIS)6 ADDED TO THE C TERMINUS 1PLS |
| | | | | | | | | | | 4 (INS(G105-LEHHHHHH)) (NMR, 25 |
| | | | | | | | | | | STRUCTURES) 1PLS 5” |
| 369 | 1b8q | A | 359 | 472 | 1.40E−20 | 0.43 | 1 | | NEURONAL NITRIC OXIDE | “OXIDOREDUCTASE PDZ DOMAIN, NNOS, |
| | | | | | | | | | SYNTHASE; CHAIN: A; | NITRIC OXIDE SYNTHASE” |
| | | | | | | | | | HEPTAPEPTIDE; CHAIN: B; | |
| 369 | 1b8q | A | 252 | 345 | 5.60E−17 | 0.16 | 0.64 | | NEURONAL NITRIC OXIDE | “OXIDOREDUCTASE PDZ DOMAIN, NNOS, |
| | | | | | | | | | SYNTHASE; CHAIN: A; | NITRIC OXIDE SYNTHASE” |
| | | | | | | | | | HEPTAPEPTIDE; CHAIN: B; | |
| 369 | 1b8q | A | 459 | 562 | 8.40E−17 | 0.35 | 0.77 | | NEURONAL NITRIC OXIDE | “OXIDOREDUCTASE PDZ DOMAIN, NNOS, |
| | | | | | | | | | SYNTHASE; CHAIN: A; | NITRIC OXIDE SYNTHASE” |
| | | | | | | | | | HEPTAPEPTIDE; CHAIN: B; | |
| 369 | 1b8q | A | 41 | 125 | 4.20E−15 | 0.23 | 0.31 | | NEURONAL NITRIC OXIDE | “OXIDOREDUCTASE PDZ DOMAIN, NNOS, |
| | | | | | | | | | SYNTHASE; CHAIN: A; | NITRIC OXIDE SYNTHASE” |
| | | | | | | | | | HEPTAPEPTIDE; CHAIN: B; | |
| 369 | 1b8q | A | 31 | 155 | 3.40E−12 | 0.18 | 0.12 | | NEURONAL NITRIC OXIDE | “OXIDOREDUCTASE PDZ DOMAIN, NNOS, |
| | | | | | | | | | SYNTHASE; CHAIN: A; | NITRIC OXIDE SYNTHASE” |
| | | | | | | | | | HEPTAPEPTIDE; CHAIN: B; | |
| 369 | 1b8q | A | 774 | 887 | 5.60E−10 | 0.11 | −0.11 | | NEURONAL NITRIC OXIDE | “OXIDOREDUCTASE PDZ DOMAIN, NNOS, |
| | | | | | | | | | SYNTHASE; CHAIN: A; | NITRIC OXIDE SYNTHASE” |
| | | | | | | | | | HEPTAPEPTIDE; CHAIN: B; | |
| 369 | 1be9 | A | 35 | 118 | 6.80E−16 | 0.48 | 1 | | PSD-95; CHAIN: A; CRIPT; | “PEPTIDE RECOGNITION PEPTIDE |
| | | | | | | | | | CHAIN: B; | RECOGNITION, PROTEIN |
| | | | | | | | | | | LOCALIZATION” |
| 369 | 1be9 | A | 266 | 362 | 3.40E−15 | 0.06 | 0.58 | | PSD-95; CHAIN: A; CRIPT; | “PEPTIDE RECOGNITION PEPTIDE |
| | | | | | | | | | CHAIN: B; | RECOGNITION, PROTEIN |
| | | | | | | | | | | LOCALIZATION” |
| 369 | 1be9 | A | 774 | 874 | 1.40E−09 | 0.31 | 0.16 | | PSD-95; CHAIN: A; CRIPT; | “PEPTIDE RECOGNITION PEPTIDE |
| | | | | | | | | | CHAIN: B; | RECOGNITION, PROTEIN |
| | | | | | | | | | | LOCALIZATION” |
| 369 | 1be9 | A | 453 | 558 | 1.70E−09 | 0.83 | 1 | | PSD-95; CHAIN: A; CRIPT; | “PEPTIDE RECOGNITION PEPTIDE |
| | | | | | | | | | CHAIN: B; | RECOGNITION, PROTEIN |
| | | | | | | | | | | LOCALIZATION” |
| 369 | 1i16 | | 459 | 551 | 1.40E−17 | 0.55 | 0.15 | | INTERLEUKIN 16; CHAIN: | “CYTOKINE LCF; CYTOKINE, |
| | | | | | | | | | NULL; | LYMPHOCYTE CHEMOATTRACTANT |
| | | | | | | | | | | FACTOR, PDZ DOMAIN” |
| 369 | 1i16 | | 259 | 358 | 1.40E−14 | 0.1 | −0.14 | | INTERLEUKIN 16; CHAIN: | “CYTOKINE LCF; CYTOKINE, |
| | | | | | | | | | NULL; | LYMPHOCYTE CHEMOATTRACTANT |
| | | | | | | | | | | FACTOR, PDZ DOMAIN” |
| 369 | 1i16 | | 362 | 444 | 2.80E−13 | 0.36 | 0.77 | | INTERLEUKIN 16; CHAIN: | “CYTOKINE LCF; CYTOKINE, |
| | | | | | | | | | NULL; | LYMPHOCYTE CHEMOATTRACTANT |
| | | | | | | | | | | FACTOR, PDZ DOMAIN” |
| 369 | 1i16 | | 266 | 333 | 1.70E−09 | −0.04 | 0 | | INTERLEUKIN 16; CHAIN: | “CYTOKINE LCF; CYTOKINE, |
| | | | | | | | | | NULL; | LYMPHOCYTE CHEMOATTRACTANT |
| | | | | | | | | | | FACTOR, PDZ DOMAIN” |
| 369 | 1i16 | | 778 | 859 | 1.10E−08 | 0.32 | −0.02 | | INTERLEUKIN 16; CHAIN: | “CYTOKINE LCF; CYTOKINE, |
| | | | | | | | | | NULL; | LYMPHOCYTE CHEMOATTRACTANT |
| | | | | | | | | | | FACTOR, PDZ DOMAIN” |
| 369 | 1kwa | A | 461 | 545 | 2.80E−18 | 0.88 | 1 | | “HCASK/LIN-2 PROTEIN; | “KINASE HCASK, GLGF REPEAT, DHR; |
| | | | | | | | | | CHAIN: A, B;” | PDZ DOMAIN, NEUREXIN, SYNDECAN, |
| | | | | | | | | | | RECEPTOR CLUSTERING, KINASE” |
| 369 | 1kwa | A | 260 | 345 | 1.40E−15 | 0.53 | 0.95 | | “HCASK/LIN-2 PROTEIN; | “KINASE HCASK, GLGF REPEAT, DHR; |
| | | | | | | | | | CHAIN: A, B;” | PDZ DOMAIN, NEUREXIN, SYNDECAN, |
| | | | | | | | | | | RECEPTOR CLUSTERING, KINASE” |
| 369 | 1kwa | A | 38 | 122 | 1.40E−14 | 0.35 | 1 | | “HCASK/LIN-2 PROTEIN; | “KINASE HCASK, GLGF REPEAT, DHR; |
| | | | | | | | | | CHAIN: A, B;” | PDZ DOMAIN, NEUREXIN, SYNDECAN, |
| | | | | | | | | | | RECEPTOR CLUSTERING, KINASE” |
| 369 | 1kwa | A | 362 | 447 | 8.40E−14 | 0.74 | 0.99 | | “HCASK/LIN-2 PROTEIN; | “KINASE HCASK, GLGF REPEAT, DHR; |
| | | | | | | | | | CHAIN: A, B;” | PDZ DOMAIN, NEUREXIN, SYNDECAN, |
| | | | | | | | | | | RECEPTOR CLUSTERING, KINASE” |
| 369 | 1kwa | A | 776 | 859 | 4.20E−12 | 0.1 | 0.37 | | “HCASK/LIN-2 PROTEIN; | “KINASE HCASK, GLGF REPEAT, DHR; |
| | | | | | | | | | CHAIN: A, B;” | PDZ DOMAIN, NEUREXIN, SYNDECAN, |
| | | | | | | | | | | RECEPTOR CLUSTERING, KINASE” |
| 369 | 1kwa | A | 37 | 124 | 5.10E−12 | 0.2 | 1 | | “HCASK/LIN-2 PROTEIN; | “KINASE HCASK, GLGF REPEAT, DHR; |
| | | | | | | | | | CHAIN: A, B;” | PDZ DOMAIN, NEUREXIN, SYNDECAN, |
| | | | | | | | | | | RECEPTOR CLUSTERING, KINASE” |
| 369 | 1pdr | | 459 | 547 | 2.80E−16 | 0.72 | 1 | | HUMAN DISCS LARGE | “SIGNAL TRANSDUCTION HDLG, DHR3 |
| | | | | | | | | | PROTEIN; CHAIN: NULL; | DOMAIN; SIGNAL TRANSDUCTION, SH3 |
| | | | | | | | | | | DOMAIN, REPEAT” |
| 369 | 1pdr | | 37 | 123 | 3.40E−15 | 0.45 | 1 | | HUMAN DISCS LARGE | “SIGNAL TRANSDUCTION HDLG, DHR3 |
| | | | | | | | | | PROTEIN; CHAIN: NULL; | DOMAIN; SIGNAL TRANSDUCTION, SH3 |
| | | | | | | | | | | DOMAIN, REPEAT” |
| 369 | 1pdr | | 266 | 354 | 1.00E−13 | 0.05 | 0.23 | | HUMAN DISCS LARGE | “SIGNAL TRANSDUCTION HDLG, DHR3 |
| | | | | | | | | | PROTEIN; CHAIN: NULL; | DOMAIN; SIGNAL TRANSDUCTION, SH3 |
| | | | | | | | | | | DOMAIN, REPEAT” |
| 369 | 1pdr | | 362 | 453 | 1.30E−11 | 0.82 | 1 | | HUMAN DISCS LARGE | “SIGNAL TRANSDUCTION HDLG, DHR3 |
| | | | | | | | | | PROTEIN; CHAIN: NULL; | DOMAIN; SIGNAL TRANSDUCTION, SH3 |
| | | | | | | | | | | DOMAIN, REPEAT” |
| 369 | 1pdr | | 777 | 866 | 1.70E−09 | 0.14 | 0.34 | | HUMAN DISCS LARGE | “SIGNAL TRANSDUCTION HDLG, DHR3 |
| | | | | | | | | | PROTEIN; CHAIN: NULL; | DOMAIN; SIGNAL TRANSDUCTION, SH3 |
| | | | | | | | | | | DOMAIN, REPEAT” |
| 369 | 1qav | A | 35 | 122 | 3.40E−17 | 0.58 | 1 | | ALPHA-1 SYNTROPHIN | “MEMBRANE |
| | | | | | | | | | (RESIDUES 77-171); CHAIN: | PROTEIN/OXIDOREDUCTASE BETA- |
| | | | | | | | | | A; NEURONAL NITRIC | FINGER, HETERODIMER” |
| | | | | | | | | | OXIDE SYNTHASE | |
| | | | | | | | | | (RESIDUES 1-130); CHAIN: B; | |
| 369 | 1qav | A | 269 | 346 | 1.50E−12 | 0.02 | 0.84 | | ALPHA-1 SYNTROPHIN | “MEMBRANE |
| | | | | | | | | | (RESIDUES 77-171); CHAIN: | PROTEIN/OXIDOREDUCTASE BETA- |
| | | | | | | | | | A; NEURONAL NITRIC | FINGER, HETERODIMER” |
| | | | | | | | | | OXIDE SYNTHASE | |
| | | | | | | | | | (RESIDUES 1-130); CHAIN: B; | |
| 369 | 1qav | A | 779 | 855 | 5.10E−06 | 0.21 | 0.11 | | ALPHA-1 SYNTROPHIN | “MEMBRANE |
| | | | | | | | | | (RESIDUES 77-171); CHAIN: | PROTEIN/OXIDOREDUCTASE BETA- |
| | | | | | | | | | A; NEURONAL NITRIC | FINGER, HETERODIMER” |
| | | | | | | | | | OXIDE SYNTHASE | |
| | | | | | | | | | (RESIDUES 1-130); CHAIN: B; | |
| 369 | 1qlc | A | 459 | 545 | 1.40E−18 | 1.01 | 1 | | POSTSYNAPTIC DENSITY | “PEPTIDE RECOGNITION PSD-95; PDZ |
| | | | | | | | | | PROTEIN 95; CHAIN: A; | DOMAIN, NEURONAL NITRIC OXIDE |
| | | | | | | | | | | SYNTHASE, NMDA RECEPTOR 2 |
| | | | | | | | | | | BINDING” |
| 369 | 1qlc | A | 36 | 123 | 5.10E−16 | 0.66 | 0.93 | | POSTSYNAPTIC DENSITY | “PEPTIDE RECOGNITION PSD-95; PDZ |
| | | | | | | | | | PROTEIN 95; CHAIN: A; | DOMAIN, NEURONAL NITRIC OXIDE |
| | | | | | | | | | | SYNTHASE, NMDA RECEPTOR 2 |
| | | | | | | | | | | BINDING” |
| 369 | 1qlc | A | 266 | 348 | 3.40E−14 | 0.35 | 0.55 | | POSTSYNAPTIC DENSITY | “PEPTIDE RECOGNITION PSD-95; PDZ |
| | | | | | | | | | PROTEIN 95; CHAIN: A; | DOMAIN, NEURONAL NITRIC OXIDE |
| | | | | | | | | | | SYNTHASE, NMDA RECEPTOR 2 |
| | | | | | | | | | | BINDING” |
| 369 | 1qlc | A | 362 | 447 | 1.40E−13 | 0.36 | 1 | | POSTSYNAPTIC DENSITY | “PEPTIDE RECOGNITION PSD-95; PDZ |
| | | | | | | | | | PROTEIN 95; CHAIN: A; | DOMAIN, NEURONAL NITRIC OXIDE |
| | | | | | | | | | | SYNTHASE, NMDA RECEPTOR 2 |
| | | | | | | | | | | BINDING” |
| 369 | 1qlc | A | 774 | 857 | 2.80E−10 | 0.48 | 0.74 | | POSTSYNAPTIC DENSITY | “PEPTIDE RECOGNITION PSD-95; PDZ |
| | | | | | | | | | PROTEIN 95; CHAIN: A; | DOMAIN, NEURONAL NITRIC OXIDE |
| | | | | | | | | | | SYNTHASE, NMDA RECEPTOR 2 |
| | | | | | | | | | | BINDING” |
| 369 | 1qlc | A | 466 | 542 | 5.10E−07 | 0.84 | 1 | | POSTSYNAPTIC DENSITY | “PEPTIDE RECOGNITION PSD-95; PDZ |
| | | | | | | | | | PROTEIN 95; CHAIN: A; | DOMAIN, NEURONAL NITRIC OXIDE |
| | | | | | | | | | | SYNTHASE, NMDA RECEPTOR 2 |
| | | | | | | | | | | BINDING” |
| 369 | 3pdz | A | 33 | 118 | 3.40E−15 | 0.71 | 0.87 | | “TYROSINE PHOSPHATASE | “HYDROLASE PDZ DOMAIN, HUMAN |
| | | | | | | | | | (PTP-BAS, TYPE 1); CHAIN: | PHOSPHATASE, HPTP1E, PTP-BAS, |
| | | | | | | | | | A;” | SPECIFICITY 2 OF BINDING” |
| 369 | 3pdz | A | 266 | 341 | 1.70E−13 | 0.15 | 0.54 | | “TYROSINE PHOSPHATASE | “HYDROLASE PDZ DOMAIN, HUMAN |
| | | | | | | | | | (PTP-BAS, TYPE 1); CHAIN: | PHOSPHATASE, HPTP1E, PTP-BAS, |
| | | | | | | | | | A;” | SPECIFICITY 2 OF BINDING” |
| 369 | 3pdz | A | 460 | 545 | 1.70E−07 | 0.95 | 1 | | “TYROSINE PHOSPHATASE | “HYDROLASE PDZ DOMAIN, HUMAN |
| | | | | | | | | | (PTP-BAS, TYPE 1); CHAIN: | PHOSPHATASE, HPTP1E, PTP-BAS, |
| | | | | | | | | | A;” | SPECIFICITY 2 OF BINDING” |
| 369 | 3pdz | A | 788 | 862 | 3.40E−07 | 0 | 0.12 | | “TYROSINE PHOSPHATASE | “HYDROLASE PDZ DOMAIN, HUMAN |
| | | | | | | | | | (PTP-BAS, TYPE 1); CHAIN: | PHOSPHATASE, HPTP1E, PTP-BAS, |
| | | | | | | | | | A;” | SPECIFICITY 2 OF BINDING” |
| 370 | 1a17 | | 1126 | 1263 | 9.80E−22 | 0.42 | 1 | | SERINE/THREONINE | “HYDROLASE TETRATRICOPEPTIDE, TRP; |
| | | | | | | | | | PROTEIN PHOSPHATASE 5; | HYDROLASE, PHOSPHATASE, PROTEIN- |
| | | | | | | | | | CHAIN: NULL; | PROTEIN INTERACTIONS, TPR, 2 SUPER- |
| | | | | | | | | | | HELIX, X-RAY STRUCTURE” |
| 370 | 1a5e | | 934 | 1063 | 9.80E−32 | 0.41 | 0.99 | | TUMOR SUPPRESSOR | “ANTI-ONCOGENE CELL CYCLE, ANTI- |
| | | | | | | | | | P16INK4A; CHAIN: NULL; | ONCOGENE, REPEAT, ANK REPEAT” |
| 370 | 1a5e | | 740 | 856 | 3.40E−19 | 0.61 | 1 | | TUMOR SUPPRESSOR | “ANTI-ONCOGENE CELL CYCLE, ANTI- |
| | | | | | | | | | P16INK4A; CHAIN: NULL; | ONCOGENE, REPEAT, ANK REPEAT” |
| 370 | 1awc | B | 915 | 1066 | 1.40E−44 | 0.72 | 1 | | “GA BINDING PROTEIN | “COMPLEX (TRANSCRIPTION |
| | | | | | | | | | ALPHA; CHAIN: A; GA | REGULATION/DNA) GABPALPHA; |
| | | | | | | | | | BINDING PROTEIN BETA 1; | GABPBETA1; COMPLEX (TRANSCRIPTION |
| | | | | | | | | | CHAIN: B; DNA; CHAIN: D, | REGULATION/DNA), DNA-BINDING, 2 |
| | | | | | | | | | E;” | NUCLEAR PROTEIN, ETS DOMAIN, |
| | | | | | | | | | | ANKYRIN REPEATS, TRANSCRIPTION 3 |
| | | | | | | | | | | FACTOR” |
| 370 | 1awc | B | 951 | 1099 | 1.40E−42 | 0.35 | 1 | | “GA BINDING PROTEIN | “COMPLEX (TRANSCRIPTION |
| | | | | | | | | | ALPHA; CHAIN: A; GA | REGULATION/DNA) GABPALPHA; |
| | | | | | | | | | BINDING PROTEIN BETA 1; | GABPBETA1; COMPLEX (TRANSCRIPTION |
| | | | | | | | | | CHAIN: B; DNA; CHAIN: D, | REGULATION/DNA), DNA-BINDING, 2 |
| | | | | | | | | | E;” | NUCLEAR PROTEIN, ETS DOMAIN, |
| | | | | | | | | | | ANKYRIN REPEATS, TRANSCRIPTION 3 |
| | | | | | | | | | | FACTOR” |
| 370 | 1awc | B | 919 | 1066 | 5.10E−40 | 0.59 | 1 | | “GA BINDING PROTEIN | “COMPLEX (TRANSCRIPTION |
| | | | | | | | | | ALPHA; CHAIN: A; GA | REGULATION/DNA) GABPALPHA; |
| | | | | | | | | | BINDING PROTEIN BETA 1; | GABPBETA1; COMPLEX (TRANSCRIPTION |
| | | | | | | | | | CHAIN: B; DNA; CHAIN: D, | REGULATION/DNA), DNA-BINDING, 2 |
| | | | | | | | | | E;” | NUCLEAR PROTEIN, ETS DOMAIN, |
| | | | | | | | | | | ANKYRIN REPEATS, TRANSCRIPTION 3 |
| | | | | | | | | | | FACTOR” |
| 370 | 1awc | B | 952 | 1099 | 1.70E−38 | 0.27 | 1 | | “GA BINDING PROTEIN | “COMPLEX (TRANSCRIPTION |
| | | | | | | | | | ALPHA; CHAIN: A; GA | REGULATION/DNA) GABPALPHA; |
| | | | | | | | | | BINDING PROTEIN BETA 1; | GABPBETA1; COMPLEX (TRANSCRIPTION |
| | | | | | | | | | CHAIN: B; DNA; CHAIN: D, | REGULATION/DNA), DNA-BINDING, 2 |
| | | | | | | | | | E;” | NUCLEAR PROTEIN, ETS DOMAIN, |
| | | | | | | | | | | ANKYRIN REPEATS, TRANSCRIPTION 3 |
| | | | | | | | | | | FACTOR” |
| 370 | 1awc | B | 881 | 1033 | 1.70E−37 | 0.64 | 1 | | “GA BINDING PROTEIN | “COMPLEX (TRANSCRIPTION |
| | | | | | | | | | ALPHA; CHAIN: A; GA | REGULATION/DNA) GABPALPHA; |
| | | | | | | | | | BINDING PROTEIN BETA 1; | GABPBETA1; COMPLEX (TRANSCRIPTION |
| | | | | | | | | | CHAIN: B; DNA; CHAIN: D, | REGULATION/DNA), DNA-BINDING, 2 |
| | | | | | | | | | E;” | NUCLEAR PROTEIN, ETS DOMAIN, |
| | | | | | | | | | | ANKYRIN REPEATS, TRANSCRIPTION 3 |
| | | | | | | | | | | FACTOR” |
| 370 | 1awc | B | 985 | 1132 | 1.70E−37 | 0.4 | 1 | | “GA BINDING PROTEIN | “COMPLEX (TRANSCRIPTION |
| | | | | | | | | | ALPHA; CHAIN: A; GA | REGULATION/DNA) GABPALPHA; |
| | | | | | | | | | BINDING PROTEIN BETA 1; | GABPBETA1; COMPLEX (TRANSCRIPTION |
| | | | | | | | | | CHAIN: B; DNA; CHAIN: D, | REGULATION/DNA), DNA-BINDING, 2 |
| | | | | | | | | | E;” | NUCLEAR PROTEIN, ETS DOMAIN, |
| | | | | | | | | | | ANKYRIN REPEATS, TRANSCRIPTION 3 |
| | | | | | | | | | | FACTOR” |
| 370 | 1awc | B | 740 | 896 | 3.40E−36 | 0.59 | 1 | | “GA BINDING PROTEIN | “COMPLEX (TRANSCRIPTION |
| | | | | | | | | | ALPHA; CHAIN: A; GA | REGULATION/DNA) GABPALPHA; |
| | | | | | | | | | BINDING PROTEIN BETA 1; | GABPBETA1; COMPLEX (TRANSCRIPTION |
| | | | | | | | | | CHAIN: B; DNA; CHAIN: D, | REGULATION/DNA), DNA-BINDING, 2 |
| | | | | | | | | | E;” | NUCLEAR PROTEIN, ETS DOMAIN, |
| | | | | | | | | | | ANKYRIN REPEATS, TRANSCRIPTION 3 |
| | | | | | | | | | | FACTOR” |
| 370 | 1awc | B | 1018 | 1185 | 1.40E−32 | −0.14 | 0.18 | | “GA BINDING PROTEIN | “COMPLEX (TRANSCRIPTION |
| | | | | | | | | | ALPHA; CHAIN: A; GA | REGULATION/DNA) GABPALPHA; |
| | | | | | | | | | BINDING PROTEIN BETA 1; | GABPBETA1; COMPLEX (TRANSCRIPTION |
| | | | | | | | | | CHAIN: B; DNA; CHAIN: D, | REGULATION/DNA), DNA-BINDING, 2 |
| | | | | | | | | | E;” | NUCLEAR PROTEIN, ETS DOMAIN, |
| | | | | | | | | | | ANKYRIN REPEATS, TRANSCRIPTION 3 |
| | | | | | | | | | | FACTOR” |
| 370 | 1awc | B | 808 | 967 | 1.70E−30 | 0.53 | 1 | | “GA BINDING PROTEIN | “COMPLEX (TRANSCRIPTION |
| | | | | | | | | | ALPHA; CHAIN: A; GA | REGULATION/DNA) GABPALPHA; |
| | | | | | | | | | BINDING PROTEIN BETA 1; | GABPBETA1; COMPLEX (TRANSCRIPTION |
| | | | | | | | | | CHAIN: B; DNA; CHAIN: D, | REGULATION/DNA), DNA-BINDING, 2 |
| | | | | | | | | | E;” | NUCLEAR PROTEIN, ETS DOMAIN, |
| | | | | | | | | | | ANKYRIN REPEATS, TRANSCRIPTION 3 |
| | | | | | | | | | | FACTOR” |
| 370 | 1awc | B | 697 | 823 | 1.20E−22 | −0.11 | 0.82 | | “GA BINDING PROTEIN | “COMPLEX (TRANSCRIPTION |
| | | | | | | | | | ALPHA; CHAIN: A; GA | REGULATION/DNA) GABPALPHA; |
| | | | | | | | | | BINDING PROTEIN BETA 1; | GABPBETA1; COMPLEX (TRANSCRIPTION |
| | | | | | | | | | CHAIN: B; DNA; CHAIN: D, | REGULATION/DNA), DNA-BINDING, 2 |
| | | | | | | | | | E;” | NUCLEAR PROTEIN, ETS DOMAIN, |
| | | | | | | | | | | ANKYRIN REPEATS, TRANSCRIPTION 3 |
| | | | | | | | | | | FACTOR” |
| 370 | 1bd8 | | 922 | 1069 | 6.80E−32 | 0.74 | 1 | | P19INK4D CDK4/6 | “TUMOR SUPPRESSOR TUMOR |
| | | | | | | | | | INHIBITOR; CHAIN: NULL; | SUPPRESSOR, CDK4/6 INHIBITOR, |
| | | | | | | | | | | ANKYRIN MOTIF” |
| 370 | 1bd8 | | 988 | 1135 | 8.50E−31 | 0.23 | 0.94 | | P19INK4D CDK4/6 | “TUMOR SUPPRESSOR TUMOR |
| | | | | | | | | | INHIBITOR; CHAIN: NULL; | SUPPRESSOR, CDK4/6 INHIBITOR, |
| | | | | | | | | | | ANKYRIN MOTIF” |
| 370 | 1bd8 | | 743 | 900 | 1.20E−29 | 0.67 | 1 | | P19INK4D CDK4/6 | “TUMOR SUPPRESSOR TUMOR |
| | | | | | | | | | INHIBITOR; CHAIN: NULL; | SUPPRESSOR, CDK4/6 INHIBITOR, |
| | | | | | | | | | | ANKYRIN MOTIF” |
| 370 | 1bd8 | | 636 | 826 | 3.40E−20 | 0.01 | 0.29 | | P19INK4D CDK4/6 | “TUMOR SUPPRESSOR TUMOR |
| | | | | | | | | | INHIBITOR; CHAIN: NULL; | SUPPRESSOR, CDK4/6 INHIBITOR, |
| | | | | | | | | | | ANKYRIN MOTIF” |
| 370 | 1bi7 | B | 740 | 856 | 8.50E−20 | 0.66 | 1 | | CYCLIN-DEPENDENT | “COMPLEX (KINASE/ANTI-ONCOGENE) |
| | | | | | | | | | KINASE 6; CHAIN: A; | CDK6; P16INK4A, MTS1; CYCLIN |
| | | | | | | | | | MULTIPLE TUMOR | DEPENDENT KINASE, CYCLIN |
| | | | | | | | | | SUPPRESSOR; CHAIN: B; | DEPENDENT KINASE INHIBITORY 2 |
| | | | | | | | | | | PROTEIN, CDK, INK4, CELL CYCLE, |
| | | | | | | | | | | MULTIPLE TUMOR SUPPRESSOR, 3 MTS1, |
| | | | | | | | | | | COMPLEX (KINASE/ANTI-ONCOGENE) |
| | | | | | | | | | | HEADER” |
| 370 | 1blx | B | 917 | 1071 | 1.40E−42 | 0.67 | 1 | | CYCLIN-DEPENDENT | “COMPLEX (INHIBITOR |
| | | | | | | | | | KINASE 6; CHAIN: A; | PROTEIN/KINASE) INHIBITOR PROTEIN, |
| | | | | | | | | | P19INK4D; CHAIN: B; | CYCLIN-DEPENDENT KINASE, CELL |
| | | | | | | | | | | CYCLE 2 CONTROL, ALPHA/BETA, |
| | | | | | | | | | | COMPLEX (INHIBITOR |
| | | | | | | | | | | PROTEIN/KINASE)” |
| 370 | 1blx | B | 952 | 1104 | 1.40E−40 | 0.51 | 1 | | CYCLIN-DEPENDENT | “COMPLEX (INHIBITOR |
| | | | | | | | | | KINASE 6; CHAIN: A; | PROTEIN/KINASE) INHIBITOR PROTEIN, |
| | | | | | | | | | P19INK4D; CHAIN: B; | CYCLIN-DEPENDENT KINASE, CELL |
| | | | | | | | | | | CYCLE 2 CONTROL, ALPHA/BETA, |
| | | | | | | | | | | COMPLEX (INHIBITOR |
| | | | | | | | | | | PROTEIN/KINASE)” |
| 370 | 1blx | B | 806 | 1005 | 8.40E−31 | 0.05 | 0.93 | | CYCLIN-DEPENDENT | “COMPLEX (INHIBITOR |
| | | | | | | | | | KINASE 6; CHAIN: A; | PROTEIN/KINASE) INHIBITOR PROTEIN, |
| | | | | | | | | | P19INK4D; CHAIN: B; | CYCLIN-DEPENDENT KINASE, CELL |
| | | | | | | | | | | CYCLE 2 CONTROL, ALPHA/BETA, |
| | | | | | | | | | | COMPLEX (INHIBITOR |
| | | | | | | | | | | PROTEIN/KINASE)” |
| 370 | 1blx | B | 743 | 900 | 1.70E−30 | 0.78 | 1 | | CYCLIN-DEPENDENT | “COMPLEX (INHIBITOR |
| | | | | | | | | | KINASE 6; CHAIN: A; | PROTEIN/KINASE) INHIBITOR PROTEIN, |
| | | | | | | | | | P19INK4D; CHAIN: B; | CYCLIN-DEPENDENT KINASE, CELL |
| | | | | | | | | | | CYCLE 2 CONTROL, ALPHA/BETA, |
| | | | | | | | | | | COMPLEX (INHIBITOR |
| | | | | | | | | | | PROTEIN/KINASE)” |
| 370 | 1blx | B | 1323 | 1437 | 1.20E−10 | 0.13 | −0.19 | | CYCLIN-DEPENDENT | “COMPLEX (INHIBITOR |
| | | | | | | | | | KINASE 6; CHAIN: A; | PROTEIN/KINASE) INHIBITOR PROTEIN, |
| | | | | | | | | | P19INK4D; CHAIN: B; | CYCLIN-DEPENDENT KINASE, CELL |
| | | | | | | | | | | CYCLE 2 CONTROL, ALPHA/BETA, |
| | | | | | | | | | | COMPLEX (INHIBITOR |
| | | | | | | | | | | PROTEIN/KINASE)” |
| 370 | 1bu9 | A | 915 | 1071 | 2.80E−41 | 1.03 | 1 | | CYCLIN-DEPENDENT | “HORMONE/GROWTH FACTOR P18- |
| | | | | | | | | | KINASE 6 INHIBITOR; | INK4C; CELL CYCLE INHIBITOR, |
| | | | | | | | | | CHAIN: A; | P18INK4C, TUMOR, SUPPRESSOR, |
| | | | | | | | | | | CYCLIN-2 DEPENDENT KINASE, |
| | | | | | | | | | | HORMONE/GROWTH FACTOR” |
| 370 | 1bu9 | A | 951 | 1104 | 1.30E−36 | 0.63 | 1 | | CYCLIN-DEPENDENT | “HORMONE/GROWTH FACTOR P18- |
| | | | | | | | | | KINASE 6 INHIBITOR; | INK4C; CELL CYCLE INHIBITOR, |
| | | | | | | | | | CHAIN: A; | P18INK4C, TUMOR, SUPPRESSOR, |
| | | | | | | | | | | CYCLIN-2 DEPENDENT KINASE, |
| | | | | | | | | | | HORMONE/GROWTH FACTOR” |
| 370 | 1bu9 | A | 919 | 1071 | 5.10E−36 | 0.99 | 1 | | CYCLIN-DEPENDENT | “HORMONE/GROWTH FACTOR P18- |
| | | | | | | | | | KINASE 6 INHIBITOR; | INK4C; CELL CYCLE INHIBITOR, |
| | | | | | | | | | CHAIN: A; | P18INK4C, TUMOR, SUPPRESSOR, |
| | | | | | | | | | | CYCLIN-2 DEPENDENT KINASE, |
| | | | | | | | | | | HORMONE/GROWTH FACTOR” |
| 370 | 1bu9 | A | 985 | 1137 | 3.40E−35 | 0.07 | 0.24 | | CYCLIN-DEPENDENT | “HORMONE/GROWTH FACTOR P18- |
| | | | | | | | | | KINASE 6 INHIBITOR; | INK4C; CELL CYCLE INHIBITOR, |
| | | | | | | | | | CHAIN: A; | P18INK4C, TUMOR, SUPPRESSOR, |
| | | | | | | | | | | CYCLIN-2 DEPENDENT KINASE, |
| | | | | | | | | | | HORMONE/GROWTH FACTOR” |
| 370 | 1bu9 | A | 738 | 901 | 1.00E−34 | 0.48 | 0.8 | | CYCLIN-DEPENDENT | “HORMONE/GROWTH FACTOR P18- |
| | | | | | | | | | KINASE 6 INHIBITOR; | INK4C; CELL CYCLE INHIBITOR, |
| | | | | | | | | | CHAIN: A; | P18INK4C, TUMOR, SUPPRESSOR, |
| | | | | | | | | | | CYCLIN-2 DEPENDENT KINASE, |
| | | | | | | | | | | HORMONE/GROWTH FACTOR” |
| 370 | 1d9s | A | 938 | 1071 | 7.00E−37 | 0.64 | 1 | | CYCLIN-DEPENDENT | “SIGNALING PROTEIN HELIX-TURN- |
| | | | | | | | | | KINASE 4 INHIBITOR B; | HELIX, ANKYRIN REPEAT” |
| | | | | | | | | | CHAIN: A; | |
| 370 | 1d9s | A | 971 | 1104 | 5.60E−34 | 0.48 | 0.99 | | CYCLIN-DEPENDENT | “SIGNALING PROTEIN HELIX-TURN- |
| | | | | | | | | | KINASE 4 INHIBITOR B; | HELIX, ANKYRIN REPEAT” |
| | | | | | | | | | CHAIN: A; | |
| 370 | 1d9s | A | 748 | 857 | 5.60E−20 | 0.19 | 0.8 | | CYCLIN-DEPENDENT | “SIGNALING PROTEIN HELIX-TURN- |
| | | | | | | | | | KINASE 4 INHIBITOR B; | HELIX, ANKYRIN REPEAT” |
| | | | | | | | | | CHAIN: A; | |
| 370 | 1d9s | A | 740 | 856 | 6.80E−20 | 0.49 | 1 | | CYCLIN-DEPENDENT | “SIGNALING PROTEIN HELIX-TURN- |
| | | | | | | | | | KINASE 4 INHIBITOR B; | HELIX, ANKYRIN REPEAT” |
| | | | | | | | | | CHAIN: A; | |
| 370 | 1elr | A | 1127 | 1255 | 7.00E−18 | 0.5 | 0.96 | | TPR2A-DOMAIN OF HOP; | “CHAPERONE HOP, TPR-DOMAIN, |
| | | | | | | | | | CHAIN: A; HSP90-PEPTIDE | PEPTIDE-COMPLEX, HELICAL REPEAT, |
| | | | | | | | | | MEEVD; CHAIN: B; | HSP90, 2 PROTEIN BINDING” |
| 370 | 1elw | A | 1126 | 1251 | 2.80E−22 | 0.52 | 1 | | “TPR1-DOMAIN OF HOP; | “CHAPERONE HOP, TPR-DOMAIN, |
| | | | | | | | | | CHAIN: A, B; HSC70- | PEPTIDE-COMPLEX, HELICAL REPEAT, |
| | | | | | | | | | PEPTIDE; CHAIN: C, D;” | HSC70, 2 HSP70, PROTEIN BINDING” |
| 370 | 1ihb | A | 919 | 1070 | 3.40E−35 | 1.03 | 1 | | “CYCLIN-DEPENDENT | “CELL CYCLE INHIBITOR P18- |
| | | | | | | | | | KINASE 6 INHIBITOR; | INK4C(INK6); CELL CYCLE INHIBITOR, |
| | | | | | | | | | CHAIN: A, B;” | P18-INK4C(INK6), ANKYRIN REPEAT, 2 |
| | | | | | | | | | | CDK 4/6 INHIBITOR” |
| 370 | 1ihb | A | 985 | 1136 | 1.40E−34 | 0.27 | 0.98 | | “CYCLIN-DEPENDENT | “CELL CYCLE INHIBITOR P18- |
| | | | | | | | | | KINASE 6 INHIBITOR; | TNK4C(INK6); CELL CYCLE INHIBITOR, |
| | | | | | | | | | CHAIN: A, B;” | P18-INK4C(INK6), ANKYRIN REPEAT, 2 |
| | | | | | | | | | | CDK 4/6 INHIBITOR” |
| 370 | 1ihb | A | 738 | 900 | 3.40E−34 | 0.81 | 1 | | “CYCLIN-DEPENDENT | “CELL CYCLE INHIBITOR P18- |
| | | | | | | | | | KINASE 6 INHIBITOR; | INK4C(INK6); CELL CYCLE INHIBITOR, |
| | | | | | | | | | CHAIN: A, B;” | P18-INK4C(INK6), ANKYRIN REPEAT, 2 |
| | | | | | | | | | | CDK 4/6 INHIBITOR” |
| 370 | 1ikn | D | 914 | 1099 | 3.40E−43 | 0.24 | 1 | | NF-KAPPA-B P65 SUBUNIT; | “TRANSCRIPTION FACTOR P65; P50D; |
| | | | | | | | | | CHAIN: A; NF-KAPPA-B | TRANSCRIPTION FACTOR, IKB/NFKB |
| | | | | | | | | | P50D SUBUNIT; CHAIN: C; I- | COMPLEX” |
| | | | | | | | | | KAPPA-B-ALPHA; CHAIN: D; | |
| 370 | 1ikn | D | 770 | 951 | 5.10E−40 | 0.18 | 0.83 | | NF-KAPPA-B P65 SUBUNIT; | “TRANSCRIPTION FACTOR P65; P50D; |
| | | | | | | | | | CHAIN: A; NF-KAPPA-B | TRANSCRIPTION FACTOR, IKB/NFKB |
| | | | | | | | | | P50D SUBUNIT; CHAIN: C; I- | COMPLEX” |
| | | | | | | | | | KAPPA-B-ALPHA; CHAIN: D; | |
| 370 | 1ikn | D | 876 | 1050 | 1.50E−33 | 0.15 | 0.95 | | NF-KAPPA-B P65 SUBUNIT; | “TRANSCRIPTION FACTOR P65; P50D; |
| | | | | | | | | | CHAIN: A; NF-KAPPA-B | TRANSCRIPTION FACTOR, IKB/NFKB |
| | | | | | | | | | P50D SUBUNIT; CHAIN: C; I- | COMPLEX” |
| | | | | | | | | | KAPPA-B-ALPHA; CHAIN: D; | |
| 370 | 1ikn | D | 735 | 907 | 1.70E−30 | 0.29 | 0.54 | | NF-KAPPA-B P65 SUBUNIT; | “TRANSCRIPTION FACTOR P65; P50D; |
| | | | | | | | | | CHAIN: A; NF-KAPPA-B | TRANSCRIPTION FACTOR, IKB/NFKB |
| | | | | | | | | | P50D SUBUNIT; CHAIN: C; I- | COMPLEX” |
| | | | | | | | | | KAPPA-B-ALPHA; CHAIN: D; | |
| 370 | 1myo | | 741 | 858 | 3.40E−24 | 0.19 | 0.9 | | MYOTROPHIN; CHAIN: | “ANK-REPEAT MYOTROPHIN, |
| | | | | | | | | | NULL | ACETYLATION, NMR, ANK-REPEAT” |
| 370 | 1nfi | E | 915 | 1104 | 9.80E−51 | 0.67 | 1 | | “NF-KAPPA-B P65; CHAIN: | “COMPLEX (TRANSCRIPTION REG/ANK |
| | | | | | | | | | A, C; NF-KAPPA-B P50; | REPEAT) COMPLEX (TRANSCRIPTION |
| | | | | | | | | | CHAIN: B, D; I-KAPPA-B- | REGULATION/ANK REPEAT), ANKYRIN 2 |
| | | | | | | | | | ALPHA; CHAIN: E, F;” | REPEAT HELIX” |
| 370 | 1nfi | E | 914 | 1099 | 1.70E−43 | 0.37 | 1 | | “NF-KAPPA-B P65; CHAIN: | “COMPLEX (TRANSCRIPTION REG/ANK |
| | | | | | | | | | A, C; NF-KAPPA-B P50; | REPEAT) COMPLEX (TRANSCRIPTION |
| | | | | | | | | | CHAIN: B, D; I-KAPPA-B- | REGULATION/ANK REPEAT), ANKYRIN 2 |
| | | | | | | | | | ALPHA; CHAIN: E, F;” | REPEAT HELIX” |
| 370 | 1nfi | E | 833 | 1071 | 4.20E−42 | 0.34 | 1 | | “NF-KAPPA-B P65; CHAIN: | “COMPLEX (TRANSCRIPTION REG/ANK |
| | | | | | | | | | A, C; NF-KAPPA-B P50; | REPEAT) COMPLEX (TRANSCRIPTION |
| | | | | | | | | | CHAIN: B, D; I-KAPPA-B- | REGULATION/ANK REPEAT), ANKYRIN 2 |
| | | | | | | | | | ALPHA; CHAIN: E, F;” | REPEAT HELIX” |
| 370 | 1nfi | E | 769 | 951 | 1.00E−39 | 0.46 | 1 | | “NF-KAPPA-B P65; CHAIN: | “COMPLEX (TRANSCRIPTION REG/ANK |
| | | | | | | | | | A, C; NF-KAPPA-B P50; | REPEAT) COMPLEX (TRANSCRIPTION |
| | | | | | | | | | CHAIN: B, D; I-KAPPA-B- | REGULATION/ANK REPEAT), ANKYRIN 2 |
| | | | | | | | | | ALPHA; CHAIN: E, F;” | REPEAT HELIX” |
| 370 | 1nfi | E | 802 | 1013 | 2.80E−38 | 0.35 | 1 | | “NF-KAPPA-B P65; CHAIN: | “COMPLEX (TRANSCRIPTION REG/ANK |
| | | | | | | | | | A, C; NF-KAPPA-B P50; | REPEAT) COMPLEX (TRANSCRIPTION |
| | | | | | | | | | CHAIN: B, D; I-KAPPA-B- | REGULATION/ANK REPEAT), ANKYRIN 2 |
| | | | | | | | | | ALPHA; CHAIN: E, F;” | REPEAT HELIX” |
| 370 | 1nfi | E | 876 | 1050 | 5.10E−34 | 0.58 | 1 | | “NF-KAPPA-B P65; CHAIN: | “COMPLEX (TRANSCRIPTION REG/ANK |
| | | | | | | | | | A, C; NF-KAPPA-B P50; | REPEAT) COMPLEX (TRANSCRIPTION |
| | | | | | | | | | CHAIN: B, D; I-KAPPA-B- | REGULATION/ANK REPEAT), ANKYRIN 2 |
| | | | | | | | | | ALPHA; CHAIN: E, F;” | REPEAT HELIX” |
| 370 | 1nfi | E | 735 | 907 | 8.50E−31 | 0.55 | 0.96 | | “NF-KAPPA-B P65; CHAIN: | “COMPLEX (TRANSCRIPTION REG/ANK |
| | | | | | | | | | A, C; NF-KAPPA-B P50; | REPEAT) COMPLEX (TRANSCRIPTION |
| | | | | | | | | | CHAIN: B, D; I-KAPPA-B- | REGULATION/ANK REPEAT), ANKYRIN 2 |
| | | | | | | | | | ALPHA; CHAIN: E, F;” | REPEAT HELIX” |
| 370 | 1nfi | E | 978 | 1126 | 1.10E−30 | 0.23 | 1 | | “NF-KAPPA-B P65; CHAIN: | “COMPLEX (TRANSCRIPTION REG/ANK |
| | | | | | | | | | A, C; NF-KAPPA-B P50; | REPEAT) COMPLEX (TRANSCRIPTION |
| | | | | | | | | | CHAIN: B, D; I-KAPPA-B- | REGULATION/ANK REPEAT), ANKYRIN 2 |
| | | | | | | | | | ALPHA; CHAIN: E, F;” | REPEAT HELIX” |
| 370 | 1sw6 | A | 873 | 1089 | 2.80E−31 | 0 | 0.66 | | “REGULATORY PROTEIN | “TRANSCRIPTION REGULATION |
| | | | | | | | | | SWI6; CHAIN: A, B;” | TRANSCRIPTION REGULATION, |
| | | | | | | | | | | ANKYRIN REPEATS, CELL-CYCLE” |
| 370 | 1ycs | B | 951 | 1111 | 2.80E−35 | 0.11 | 0.96 | | P53; CHAIN: A; 53BP2; | “COMPLEX (ANTI-ONCOGENE/ANKYRIN |
| | | | | | | | | | CHAIN: B; | REPEATS) P53BP2; ANKYRIN REPEATS, |
| | | | | | | | | | | SH3, P53, TUMOR SUPPRESSOR, |
| | | | | | | | | | | MULTIGENE 2 FAMILY, NUCLEAR |
| | | | | | | | | | | PROTEIN, PHOSPHORYLATION, DISEASE |
| | | | | | | | | | | MUTATION, 3 POLYMORPHISM, |
| | | | | | | | | | | COMPLEX (ANTI-ONCOGENE/ANKYRIN |
| | | | | | | | | | | REPEATS)” |
| 370 | 1ycs | B | 917 | 1085 | 2.80E−34 | 0.23 | 0.99 | | P53; CHAIN: A; 53BP2; | “COMPLEX (ANTI-ONCOGENE/ANKYRIN |
| | | | | | | | | | CHAIN: B; | REPEATS) P53BP2; ANKYRIN REPEATS, |
| | | | | | | | | | | SH3, P53, TUMOR SUPPRESSOR, |
| | | | | | | | | | | MULTIGENE 2 FAMILY, NUCLEAR |
| | | | | | | | | | | PROTEIN, PHOSPHORYLATION, DISEASE |
| | | | | | | | | | | MUTATION, 3 POLYMORPHISM, |
| | | | | | | | | | | COMPLEX (ANTI-ONCOGENE/ANKYRIN |
| | | | | | | | | | | REPEATS)” |
| 370 | 1ycs | B | 983 | 1135 | 2.80E−32 | 0.37 | 1 | | P53; CHAIN: A; 53BP2; | “COMPLEX (ANTI-ONCOGENE/ANKYRIN |
| | | | | | | | | | CHAIN: B; | REPEATS) P53BP2; ANKYRIN REPEATS, |
| | | | | | | | | | | SH3, P53, TUMOR SUPPRESSOR, |
| | | | | | | | | | | MULTIGENE 2 FAMILY, NUCLEAR |
| | | | | | | | | | | PROTEIN, PHOSPHORYLATION, DISEASE |
| | | | | | | | | | | MUTATION, 3 POLYMORPHISM, |
| | | | | | | | | | | COMPLEX (ANTI-ONCOGENE/ANKYRIN |
| | | | | | | | | | | REPEATS)” |
| 370 | 1ycs | B | 1015 | 1159 | 2.80E−23 | 0.12 | 0.68 | | P53; CHAIN: A; 53BP2; | “COMPLEX (ANTI-ONCOGENE/ANKYRIN |
| | | | | | | | | | CHAIN: B; | REPEATS) P53BP2; ANKYRIN REPEATS, |
| | | | | | | | | | | SH3, P53, TUMOR SUPPRESSOR, |
| | | | | | | | | | | MULTIGENE 2 FAMILY, NUCLEAR |
| | | | | | | | | | | PROTEIN, PHOSPHORYLATION, DISEASE |
| | | | | | | | | | | MUTATION, 3 POLYMORPHISM, |
| | | | | | | | | | | COMPLEX (ANTI-ONCOGENE/ANKYRIN |
| | | | | | | | | | | REPEATS)” |
| 370 | 1ycs | B | 740 | 832 | 1.70E−19 | 0.26 | 0.81 | | P53; CHAIN: A; 53BP2; | “COMPLEX (ANTI-ONCOGENE/ANKYRIN |
| | | | | | | | | | CHAIN: B; | REPEATS) P53BP2; ANKYRIN REPEATS, |
| | | | | | | | | | | SH3, P53, TUMOR SUPPRESSOR, |
| | | | | | | | | | | MULTIGENE 2 FAMILY, NUCLEAR |
| | | | | | | | | | | PROTEIN, PHOSPHORYLATION, DISEASE |
| | | | | | | | | | | MUTATION, 3 POLYMORPHISM, |
| | | | | | | | | | | COMPLEX (ANTI-ONCOGENE/ANKYRIN |
| | | | | | | | | | | REPEATS)” |
| 372 | 1a5e | | 730 | 857 | 9.80E−32 | 0.59 | 1 | | TUMOR SUPPRESSOR | “ANTI-ONCOGENE CELL CYCLE, ANTI- |
| | | | | | | | | | P16INK4A; CHAIN: NULL; | ONCOGENE, REPEAT, ANK REPEAT” |
| 372 | 1a5e | | 684 | 794 | 1.40E−16 | 0.65 | 0.41 | | TUMOR SUPPRESSOR | “ANTI-ONCOGENE CELL CYCLE, ANTI- |
| | | | | | | | | | P16INK4A; CHAIN: NULL; | ONCOGENE, REPEAT, ANK REPEAT” |
| 372 | 1awc | B | 712 | 862 | 2.80E−41 | 0.82 | 1 | | “GA BINDING PROTEIN | “COMPLEX (TRANSCRIPTION |
| | | | | | | | | | ALPHA; CHAIN: A; GA | REGULATION/DNA) GABPALPHA; |
| | | | | | | | | | BINDING PROTEIN BETA 1; | GABPBETA1; COMPLEX (TRANSCRIPTION |
| | | | | | | | | | CHAIN: B; DNA; CHAIN: D, | REGULATION/DNA), DNA-BlNDING, 2 |
| | | | | | | | | | E;” | NUCLEAR PROTEIN, ETS DOMAIN, |
| | | | | | | | | | | ANKYRIN REPEATS, TRANSCRIPTION 3 |
| | | | | | | | | | | FACTOR” |
| 372 | 1awc | B | 743 | 932 | 8.40E−39 | 0.38 | 1 | | “GA BINDING PROTEIN | “COMPLEX (TRANSCRIPTION |
| | | | | | | | | | ALPHA; CHAIN: A; GA | REGULATION/DNA) GABPALPHA; |
| | | | | | | | | | BINDING PROTEIN BETA 1; | GABPBETA1; COMPLEX (TRANSCRIPTION |
| | | | | | | | | | CHAIN: B; DNA; CHAIN: D, | REGULATION/DNA), DNA-BINDING, 2 |
| | | | | | | | | | E;” | NUCLEAR PROTEIN, ETS DOMAIN, |
| | | | | | | | | | | ANKYRIN REPEATS, TRANSCRIPTION 3 |
| | | | | | | | | | | FACTOR” |
| 372 | 1awc | B | 714 | 862 | 6.80E−36 | 0.95 | 1 | | “GA BINDING PROTEIN | “COMPLEX (TRANSCRIPTION |
| | | | | | | | | | ALPHA; CHAIN: A; GA | REGULATION/DNA) GABPALPHA; |
| | | | | | | | | | BINDING PROTEIN BETA 1; | GABPBETA1; COMPLEX (TRANSCRIPTION |
| | | | | | | | | | CHAIN: B; DNA; CHAIN: D, | REGULATION/DNA), DNA-BINDING, 2 |
| | | | | | | | | | E;” | NUCLEAR PROTEIN, ETS DOMAIN, |
| | | | | | | | | | | ANKYRIN REPEATS, TRANSCRIPTION 3 |
| | | | | | | | | | | FACTOR” |
| 372 | 1awc | B | 748 | 899 | 5.10E−35 | 0.69 | 1 | | “GA BINDING PROTEIN | “COMPLEX (TRANSCRIPTION |
| | | | | | | | | | ALPHA; CHAIN: A; GA | REGULATION/DNA) GABPALPHA; |
| | | | | | | | | | BINDING PROTEIN BETA 1; | GABPBETA1; COMPLEX (TRANSCRIPTION |
| | | | | | | | | | CHAIN: B; DNA; CHAIN: D, | REGULATION/DNA), DNA-BINDING, 2 |
| | | | | | | | | | E;” | NUCLEAR PROTEIN, ETS DOMAIN, |
| | | | | | | | | | | ANKYRIN REPEATS, TRANSCRIPTION 3 |
| | | | | | | | | | | FACTOR” |
| 372 | 1awc | B | 847 | 1004 | 1.70E−31 | 0.13 | 0.33 | | “GA BINDING PROTEIN | “COMPLEX (TRANSCRIPTION |
| | | | | | | | | | ALPHA; CHAIN: A; GA | REGULATION/DNA) GABPALPHA; |
| | | | | | | | | | BINDING PROTEIN BETA 1; | GABPBETA1; COMPLEX (TRANSCRIPTION |
| | | | | | | | | | CHAIN: B; DNA; CHAIN: D, | REGULATION/DNA), DNA-BINDING, 2 |
| | | | | | | | | | E;” | NUCLEAR PROTEIN, ETS DOMAIN, |
| | | | | | | | | | | ANKYRIN REPEATS, TRANSCRIPTION 3 |
| | | | | | | | | | | FACTOR” |
| 372 | 1awc | B | 779 | 963 | 2.80E−29 | 0.54 | 1 | | “GA BINDING PROTEIN | “COMPLEX (TRANSCRIPTION |
| | | | | | | | | | ALPHA; CHAIN: A; GA | REGULATION/DNA) GABPALPHA; |
| | | | | | | | | | BINDING PROTEIN BETA 1; | GABPBETA1; COMPLEX (TRANSCRIPTION |
| | | | | | | | | | CHAIN: B; DNA; CHAIN: D, | REGULATION/DNA), DNA-BINDING, 2 |
| | | | | | | | | | E;” | NUCLEAR PROTEIN, ETS DOMAIN, |
| | | | | | | | | | | ANKYRIN REPEATS, TRANSCRIPTION 3 |
| | | | | | | | | | | FACTOR” |
| 372 | 1awc | B | 1211 | 1301 | 1.70E−21 | 0.29 | −0.18 | | “GA BINDING PROTEIN | “COMPLEX (TRANSCRIPTION |
| | | | | | | | | | ALPHA; CHAIN: A; GA | REGULATION/DNA) GABPALPHA; |
| | | | | | | | | | BINDING PROTEIN BETA 1; | GABPBETA1; COMPLEX (TRANSCRIPTION |
| | | | | | | | | | CHAIN: B; DNA; CHAIN: D, | REGULATION/DNA), DNA-BINDING, 2 |
| | | | | | | | | | E;” | NUCLEAR PROTEIN, ETS DOMAIN, |
| | | | | | | | | | | ANKYRIN REPEATS, TRANSCRIPTION 3 |
| | | | | | | | | | | FACTOR” |
| 372 | 1awc | B | 617 | 763 | 1.70E−18 | 0.26 | −0.06 | | “GA BINDING PROTEIN | “COMPLEX (TRANSCRIPTION |
| | | | | | | | | | ALPHA; CHAIN: A; GA | REGULATION/DNA) GABPALPHA; |
| | | | | | | | | | BINDING PROTEIN BETA 1; | GABPBETA1; COMPLEX (TRANSCRIPTION |
| | | | | | | | | | CHAIN: B; DNA; CHAIN: D, | REGULATION/DNA), DNA-BINDING, 2 |
| | | | | | | | | | E;” | NUCLEAR PROTEIN, ETS DOMAIN, |
| | | | | | | | | | | ANKYRIN REPEATS, TRANSCRIPTION 3 |
| | | | | | | | | | | FACTOR” |
| 372 | 1awc | B | 1212 | 1317 | 1.70E−16 | 0.17 | −0.14 | | “GA BINDING PROTEIN | “COMPLEX (TRANSCRIPTION |
| | | | | | | | | | ALPHA; CHAIN: A; GA | REGULATION/DNA) GABPALPHA; |
| | | | | | | | | | BINDING PROTEIN BETA 1; | GABPBETA1; COMPLEX (TRANSCRIPTION |
| | | | | | | | | | CHAIN: B; DNA; CHAIN: D, | REGULATION/DNA), DNA-BINDING, 2 |
| | | | | | | | | | E;” | NUCLEAR PROTEIN, ETS DOMAIN, |
| | | | | | | | | | | ANKYRIN REPEATS, TRANSCRIPTION 3 |
| | | | | | | | | | | FACTOR” |
| 372 | 1bd8 | | 751 | 932 | 1.40E−25 | 0.38 | 1 | | P19INK4D CDK4/6 | “TUMOR SUPPRESSOR TUMOR |
| | | | | | | | | | INHIBITOR; CHAIN: NULL; | SUPPRESSOR, CDK4/6 INHIBITOR, |
| | | | | | | | | | | ANKYRIN MOTIF” |
| 372 | 1bd8 | | 817 | 968 | 8.50E−25 | 0.38 | 0.28 | | P19INK4D CDK4/6 | “TUMOR SUPPRESSOR TUMOR |
| | | | | | | | | | INHIBITOR; CHAIN: NULL; | SUPPRESSOR, CDK4/6 INHIBITOR, |
| | | | | | | | | | | ANKYRIN MOTIF” |
| 372 | 1bd8 | | 887 | 1050 | 5.10E−24 | 0.04 | −0.03 | | P19INK4D CDK4/6 | “TUMOR SUPPRESSOR TUMOR |
| | | | | | | | | | INHIBITOR; CHAIN: NULL; | SUPPRESSOR, CDK4/6 INHIBITOR, |
| | | | | | | | | | | ANKYRIN MOTIF” |
| 372 | 1bd8 | | 686 | 829 | 1.50E−22 | 0.64 | 1 | | P19INK4D CDK4/6 | “TUMOR SUPPRESSOR TUMOR |
| | | | | | | | | | INHIBITOR; CHAIN: NULL; | SUPPRESSOR, CDK4/6 INHIBITOR, |
| | | | | | | | | | | ANKYRIN MOTIF” |
| 372 | 1bd8 | | 617 | 766 | 5.10E−15 | 0.33 | 0.74 | | P19INK4D CDK4/6 | “TUMOR SUPPRESSOR TUMOR |
| | | | | | | | | | INHIBITOR; CHAIN: NULL; | SUPPRESSOR, CDK4/6 INHIBITOR, |
| | | | | | | | | | | ANKYRIN MOTIF” |
| 372 | 1bd8 | | 1210 | 1293 | 8.50E−15 | 0.1 | −0.01 | | P19INK4D CDK4/6 | “TUMOR SUPPRESSOR TUMOR |
| | | | | | | | | | INHIBITOR; CHAIN: NULL; | SUPPRESSOR, CDK4/6 INHIBITOR, |
| | | | | | | | | | | ANKYRIN MOTIF” |
| 372 | 1bi7 | B | 712 | 832 | 5.60E−30 | 0.69 | 1 | | CYCLIN-DEPENDENT | “COMPLEX (KINASE/ANTI-ONCOGENE) |
| | | | | | | | | | KINASE 6; CHAIN: A; | CDK6; P16INK4A, MTS1; CYCLIN |
| | | | | | | | | | MULTIPLE TUMOR | DEPENDENT KINASE, CYCLIN |
| | | | | | | | | | SUPPRESSOR; CHAIN: B; | DEPENDENT KINASE INHIBITORY 2 |
| | | | | | | | | | | PROTEIN, CDK, INK4, CELL CYCLE, |
| | | | | | | | | | | MULTIPLE TUMOR SUPPRESSOR, 3 MTS1, |
| | | | | | | | | | | COMPLEX (KINASE/ANTI-ONCOGENE) |
| | | | | | | | | | | HEADER” |
| 372 | 1bi7 | B | 777 | 932 | 4.20E−20 | 0.45 | 1 | | CYCLIN-DEPENDENT | “COMPLEX (KINASE/ANTI-ONCOGENE) |
| | | | | | | | | | KINASE 6; CHAIN: A; | CDK6; P16INK4A, MTS1; CYCLIN |
| | | | | | | | | | MULTIPLE TUMOR | DEPENDENT KINASE, CYCLIN |
| | | | | | | | | | SUPPRESSOR; CHAIN: B; | DEPENDENT KINASE INHIBITORY 2 |
| | | | | | | | | | | PROTEIN, CDK, INK4, CELL CYCLE, |
| | | | | | | | | | | MULTIPLE TUMOR SUPPRESSOR, 3 MTS1, |
| | | | | | | | | | | COMPLEX (KINASE/ANTI-ONCOGENE) |
| | | | | | | | | | | HEADER” |
| 372 | 1blx | B | 712 | 865 | 5.60E−41 | 0.84 | 1 | | CYCLIN-DEPENDENT | “COMPLEX (INHIBITOR |
| | | | | | | | | | KINASE 6; CHAIN: A; | PROTEIN/KINASE) INHIBITOR PROTEIN, |
| | | | | | | | | | P19INK4D; CHAIN: B; | CYCLIN-DEPENDENT KINASE, CELL |
| | | | | | | | | | | CYCLE 2 CONTROL, ALPHA/BETA, |
| | | | | | | | | | | COMPLEX (INHIBITOR |
| | | | | | | | | | | PROTEIN/KINASE)” |
| 372 | 1blx | B | 747 | 936 | 5.60E−36 | 0.41 | 1 | | CYCLIN-DEPENDENT | “COMPLEX (INHIBITOR |
| | | | | | | | | | KINASE 6; CHAIN: A; | PROTEIN/KINASE) INHIBITOR PROTEIN, |
| | | | | | | | | | P19INK4D; CHAIN: B; | CYCLIN-DEPENDENT KINASE, CELL |
| | | | | | | | | | | CYCLE 2 CONTROL, ALPHA/BETA, |
| | | | | | | | | | | COMPLEX (INHIBITOR |
| | | | | | | | | | | PROTEIN/KINASE)” |
| 372 | 1blx | B | 817 | 972 | 1.00E−23 | 0.3 | 0.28 | | CYCLIN-DEPENDENT | “COMPLEX (INHIBITOR |
| | | | | | | | | | KINASE 6; CHAIN: A; | PROTEIN/KINASE) INHIBITOR PROTEIN, |
| | | | | | | | | | P19INK4D; CHAIN: B; | CYCLIN-DEPENDENT KINASE, CELL |
| | | | | | | | | | | CYCLE 2 CONTROL, ALPHA/BETA, |
| | | | | | | | | | | COMPLEX (INHIBITOR |
| | | | | | | | | | | PROTEIN/KINASE)” |
| 372 | 1blx | B | 686 | 829 | 5.10E−21 | 0.59 | 1 | | CYCLIN-DEPENDENT | “COMPLEX (INHIBITOR |
| | | | | | | | | | KINASE 6; CHAIN: A; | PROTEIN/KINASE) INHIBITOR PROTEIN, |
| | | | | | | | | | P19INK4D; CHAIN: B; | CYCLIN-DEPENDENT KINASE, CELL |
| | | | | | | | | | | CYCLE 2 CONTROL, ALPHA/BETA, |
| | | | | | | | | | | COMPLEX (INHIBITOR |
| | | | | | | | | | | PROTEIN/KINASE)” |
| 372 | 1blx | B | 1210 | 1293 | 1.70E−15 | 0.27 | −0.08 | | CYCLIN-DEPENDENT | “COMPLEX (INHIBITOR |
| | | | | | | | | | KINASE 6; CHAIN: A; | PROTEIN/KINASE) INHIBITOR PROTEIN, |
| | | | | | | | | | P19INK4D; CHAIN: B; | CYCLIN-DEPENDENT KINASE, CELL |
| | | | | | | | | | | CYCLE 2 CONTROL, ALPHA/BETA, |
| | | | | | | | | | | COMPLEX (INHIBITOR |
| | | | | | | | | | | PROTEIN/KINASE)” |
| 372 | 1bu9 | A | 742 | 936 | 5.60E−36 | 0.48 | 1 | | CYCLIN-DEPENDENT | “HORMONE/GROWTH FACTOR P18- |
| | | | | | | | | | KINASE 6 INHIBITOR; | INK4C; CELL CYCLE INHIBITOR, |
| | | | | | | | | | CHAIN: A; | P18INK4C, TUMOR, SUPPRESSOR, |
| | | | | | | | | | | CYCLIN-2 DEPENDENT KINASE, |
| | | | | | | | | | | HORMONE/GROWTH FACTOR” |
| 372 | 1bu9 | A | 705 | 865 | 1.10E−35 | 0.74 | 1 | | CYCLIN-DEPENDENT | “HORMONE/GROWTH FACTOR P18- |
| | | | | | | | | | KINASE 6 INHIBITOR; | INK4C; CELL CYCLE INHIBITOR, |
| | | | | | | | | | CHAIN: A; | P18INK4C, TUMOR, SUPPRESSOR, |
| | | | | | | | | | | CYCLIN-2 DEPENDENT KINASE, |
| | | | | | | | | | | HORMONE/GROWTH FACTOR” |
| 372 | 1bu9 | A | 714 | 867 | 1.40E−33 | 0.86 | 1 | | CYCLIN-DEPENDENT | “HORMONE/GROWTH FACTOR P18- |
| | | | | | | | | | KINASE 6 INHIBITOR; | INK4C; CELL CYCLE INHIBITOR, |
| | | | | | | | | | CHAIN: A; | P18INK4C, TUMOR, SUPPRESSOR, |
| | | | | | | | | | | CYCLIN-2 DEPENDENT KINASE, |
| | | | | | | | | | | HORMONE/GROWTH FACTOR” |
| 372 | 1bu9 | A | 617 | 768 | 1.70E−17 | 0.05 | −0.01 | | CYCLIN-DEPENDENT | “HORMONE/GROWTH FACTOR P18- |
| | | | | | | | | | KINASE 6 INHIBITOR; | INK4C; CELL CYCLE INHIBITOR, |
| | | | | | | | | | CHAIN: A; | P18INK4C, TUMOR, SUPPRESSOR, |
| | | | | | | | | | | CYCLIN-2 DEPENDENT KINASE, |
| | | | | | | | | | | HORMONE/GROWTH FACTOR” |
| 372 | 1cun | A | 84 | 268 | 5.60E−14 | 0.36 | 0.29 | | “ALPHA SPECTRIN; CHAIN: | “STRUCTURAL PROTEIN TWO REPEATS |
| | | | | | | | | | A, B, C;” | OF SPECTRIN, ALPHA HELICAL LINKER |
| | | | | | | | | | | REGION, 22 TANDEM 3-HELIX COILED- |
| | | | | | | | | | | COILS, STRUCTURAL PROTEIN” |
| 372 | 1d9s | A | 736 | 865 | 1.30E−36 | 0.37 | 1 | | CYCLIN-DEPENDENT | “SIGNALING PROTEIN HELIX-TURN- |
| | | | | | | | | | KINASE 4 INHIBITOR B; | HELIX, ANKYRIN REPEAT” |
| | | | | | | | | | CHAIN: A; | |
| 372 | 1d9s | A | 712 | 833 | 1.40E−32 | 0.59 | 1 | | CYCLIN-DEPENDENT | “SIGNALING PROTEIN HELIX-TURN- |
| | | | | | | | | | KINASE 4 INHIBITOR B; | HELIX, ANKYRIN REPEAT” |
| | | | | | | | | | CHAIN: A; | |
| 372 | 1d9s | A | 801 | 967 | 2.80E−20 | 0.64 | 1 | | CYCLIN-DEPENDENT | “SIGNALING PROTEIN HELIX-TURN- |
| | | | | | | | | | KINASE 4 INHIBITOR B; | HELIX, ANKYRIN REPEAT” |
| | | | | | | | | | CHAIN: A; | |
| 372 | 1dcq | A | 1210 | 1295 | 1.00E−14 | 0.12 | −0.13 | | PYK2-ASSOCIATED | “METAL BINDING PROTEIN ZINC- |
| | | | | | | | | | PROTEIN BETA; CHAIN: A; | BINDING MODULE, ANKYRIN REPEATS, |
| | | | | | | | | | | METAL BINDING PROTEIN” |
| 372 | 1dnl | B | 18 | 240 | 2.80E−10 | 0 | 0.03 | | SYNTAXIN BINDING | “ENDOCYTOSIS/EXOCYTOSIS NSEC1; |
| | | | | | | | | | PROTEIN 1; CHAIN: A; | PROTEIN-PROTEIN COMPLEX, MULTI- |
| | | | | | | | | | SYNTAXIN 1A; CHAIN: B; | SUBUNIT” |
| 372 | 1ez3 | A | 133 | 249 | 7.00E−14 | 0.3 | −0.14 | | “SYNTAXIN-1A; CHAIN: A, | “ENDOCYTOSIS/EXOCYTOSIS |
| | | | | | | | | | B, C;” | SYNAPTOTAGMIN ASSOCIATED 35 KDA |
| | | | | | | | | | | PROTEIN, P35A, THREE HELIX BUNDLE” |
| 372 | 1ez3 | A | 150 | 270 | 1.40E−12 | 0.06 | −0.14 | | “SYNTAXIN-1A; CHAIN: A, | “ENDOCYTOSIS/EXOCYTOSIS |
| | | | | | | | | | B, C;” | SYNAPTOTAGMIN ASSOCIATED 35 KDA |
| | | | | | | | | | | PROTEIN, P35A, THREE HELIX BUNDLE” |
| 372 | 1ez3 | A | 119 | 219 | 1.10E−09 | 0.03 | −0.18 | | “SYNTAXIN-1A; CHAIN: A, | “ENDOCYTOSIS/EXOCYTOSIS |
| | | | | | | | | | B, C;” | SYNAPTOTAGMIN ASSOCIATED 35 KDA |
| | | | | | | | | | | PROTEIN, P35A, THREE HELIX BUNDLE” |
| 372 | 1ihb | A | 714 | 866 | 6.80E−33 | 1.07 | 1 | | “CYCLIN-DEPENDENT | “CELL CYCLE INHIBITOR P18- |
| | | | | | | | | | KINASE 6 INHIBITOR; | INK4C(INK6); CELL CYCLE INHIBITOR, |
| | | | | | | | | | CHAIN: A, B;” | P18-INK4C(INK6), ANKYRIN REPEAT, 2 |
| | | | | | | | | | | CDK 4/6 INHIBITOR” |
| 372 | 1ihb | A | 617 | 767 | 6.80E−17 | 0.25 | 0.19 | | “CYCLIN-DEPENDENT | “CELL CYCLE INHIBITOR P18- |
| | | | | | | | | | KINASE 6 INHIBITOR; | INK4C(INK6); CELL CYCLE INHIBITOR, |
| | | | | | | | | | CHAIN: A, B;” | P18-INK4C(INK6), ANKYRIN REPEAT, 2 |
| | | | | | | | | | | CDK 4/6 INHIBITOR” |
| 372 | 1ikn | D | 709 | 870 | 5.10E−38 | 0.2 | 1 | | NF-KAPPA-B P65 SUBUNIT; | “TRANSCRIPTION FACTOR P65; P50D; |
| | | | | | | | | | CHAIN: A; NF-KAPPA-B | TRANSCRIPTION FACTOR, IKB/NFKB |
| | | | | | | | | | P50D SUBUNIT; CHAIN: C; I- | COMPLEX” |
| | | | | | | | | | KAPPA-B-ALPHA; CHAIN: D; | |
| 372 | 1ikn | D | 776 | 965 | 5.10E−34 | 0.19 | 0.78 | | NF-KAPPA-B P65 SUBUNIT; | “TRANSCRIPTION FACTOR P65; P50D; |
| | | | | | | | | | CHAIN: A; NF-KAPPA-B | TRANSCRIPTION FACTOR, IKB/NFKB |
| | | | | | | | | | P50D SUBUNIT; CHAIN: C; I- | COMPLEX” |
| | | | | | | | | | KAPPA-B-ALPHA; CHAIN: D; | |
| 372 | 1ikn | D | 678 | 846 | 1.40E−29 | 0.57 | 1 | | NF-KAPPA-B P65 SUBUNIT; | “TRANSCRIPTION FACTOR P65; P50D; |
| | | | | | | | | | CHAIN: A; NF-KAPPA-B | TRANSCRIPTION FACTOR, IKB/NFKB |
| | | | | | | | | | P50D SUBUNIT; CHAIN: C; I- | COMPLEX” |
| | | | | | | | | | KAPPA-B-ALPHA; CHAIN: D; | |
| 372 | 1ikn | D | 842 | 1031 | 3.40E−28 | 0.04 | −0.14 | | NF-KAPPA-B P65 SUBUNIT; | “TRANSCRIPTION FACTOR P65; P50D; |
| | | | | | | | | | CHAIN: A; NF-KAPPA-B | TRANSCRIPTION FACTOR, IKB/NFKB |
| | | | | | | | | | P50D SUBUNIT; CHAIN: C; I- | COMPLEX” |
| | | | | | | | | | KAPPA-B-ALPHA; CHAIN: D; | |
| 372 | 1ikn | D | 617 | 780 | 6.80E−20 | 0.3 | 0.54 | | NF-KAPPA-B P65 SUBUNIT; | “TRANSCRIPTION FACTOR P65; P50D; |
| | | | | | | | | | CHAIN: A; NF-KAPPA-B | TRANSCRIPTION FACTOR, IKB/NFKB |
| | | | | | | | | | P50D SUBUNIT; CHAIN: C; I- | COMPLEX” |
| | | | | | | | | | KAPPA-B-ALPHA; CHAIN: D; | |
| 372 | 1myo | | 885 | 981 | 3.40E−20 | 0.22 | 0.39 | | MYOTROPHIN; CHAIN: | “ANK-REPEAT MYOTROPHIN, |
| | | | | | | | | | NULL | ACETYLATION, NMR, ANK-REPEAT” |
| 372 | 1myo | | 1211 | 1278 | 3.40E−14 | 0.25 | −0.09 | | MYOTROPHIN; CHAIN: | “ANK-REPEAT MYOTROPHIN, |
| | | | | | | | | | NULL | ACETYLATION, NMR, ANK-REPEAT” |
| 372 | 1myo | | 1213 | 1297 | 6.80E−14 | 0.21 | −0.13 | | MYOTROPHIN; CHAIN: | “ANK-REPEAT MYOTROPHIN, |
| | | | | | | | | | NULL | ACETYLATION, NMR, ANK-REPEAT” |
| 372 | 1nfi | E | 708 | 870 | 5.10E−39 | 0.6 | 1 | | “NF-KAPPA-B P65; CHAIN: | “COMPLEX (TRANSCRIPTION REG/ANK |
| | | | | | | | | | A, C; NF-KAPPA-B P50; | REPEAT) COMPLEX (TRANSCRIPTION |
| | | | | | | | | | CHAIN: B, D; I-KAPPA-B- | REGULATION/ANK REPEAT), ANKYRIN 2 |
| | | | | | | | | | ALPHA; CHAIN: E, F;” | REPEAT HELIX” |
| 372 | 1nfi | E | 712 | 936 | 7.00E−43 | 0.54 | 1 | | “NF-KAPPA-B P65; CHAIN: | “COMPLEX (TRANSCRIPTION REG/ANK |
| | | | | | | | | | A, C; NF-KAPPA-B P50; | REPEAT) COMPLEX (TRANSCRIPTION |
| | | | | | | | | | CHAIN: B, D; I-KAPPA-B- | REGULATION/ANK REPEAT), ANKYRIN 2 |
| | | | | | | | | | ALPHA; CHAIN: E, F;” | REPEAT HELIX” |
| 372 | 1nfi | E | 774 | 965 | 3.40E−34 | 0.47 | 1 | | “NF-KAPPA-B P65; CHAIN: | “COMPLEX (TRANSCRIPTION REG/ANK |
| | | | | | | | | | A, C; NF-KAPPA-B P50; | REPEAT) COMPLEX (TRANSCRIPTION |
| | | | | | | | | | CHAIN: B, D; I-KAPPA-B- | REGULATION/ANK REPEAT), ANKYRIN 2 |
| | | | | | | | | | ALPHA; CHAIN: E, F;” | REPEAT HELIX” |
| 372 | 1nfi | E | 640 | 813 | 6.80E−30 | 0.64 | 1 | | “NF-KAPPA-B P65; CHAIN: | “COMPLEX (TRANSCRIPTION REG/ANK |
| | | | | | | | | | A, C; NF-KAPPA-B P50; | REPEAT) COMPLEX (TRANSCRIPTION |
| | | | | | | | | | CHAIN: B, D; I-KAPPA-B- | REGULATION/ANK REPEAT), ANKYRIN 2 |
| | | | | | | | | | ALPHA; CHAIN: E, F;” | REPEAT HELIX” |
| 372 | 1nfi | E | 676 | 846 | 1.70E−29 | 0.82 | 1 | | “NF-KAPPA-B P65; CHAIN: | “COMPLEX (TRANSCRIPTION REG/ANK |
| | | | | | | | | | A, C; NF-KAPPA-B P50; | REPEAT) COMPLEX (TRANSCRIPTION |
| | | | | | | | | | CHAIN: B, D; I-KAPPA-B- | REGULATION/ANK REPEAT), ANKYRIN 2 |
| | | | | | | | | | ALPHA; CHAIN: E, F;” | REPEAT HELIX” |
| 372 | 1nfi | E | 625 | 780 | 1.70E−19 | 0.36 | 0.74 | | “NF-KAPPA-B P65; CHAIN: | “COMPLEX (TRANSCRIPTION REG/ANK |
| | | | | | | | | | A, C; NF-KAPPA-B P50; | REPEAT) COMPLEX (TRANSCRIPTION |
| | | | | | | | | | CHAIN: B, D; I-KAPPA-B- | REGULATION/ANK REPEAT), ANKYRN 2 |
| | | | | | | | | | ALPHA; CHAIN: E, F;” | REPEAT HELIX” |
| 372 | 1sig | | 48 | 262 | 1.40E−07 | −0.11 | 0.12 | | RNA POLYMERASE | “TRANSCRIPTION REGULATION |
| | | | | | | | | | PRIMARY SIGMA FACTOR; | SIGMA70; RNA POLYMERASE SIGMA |
| | | | | | | | | | CHAIN: NULL; | FACTOR, TRANSCRIPTION REGULATION” |
| 372 | 1ycs | B | 712 | 921 | 2.80E−34 | 0.53 | 1 | | P53; CHAIN: A; 53BP2; | “COMPLEX (ANTI-ONCOGENE/ANKYRIN |
| | | | | | | | | | CHAIN: B; | REPEATS) P53BP2; ANKYRIN REPEATS, |
| | | | | | | | | | | SH3, P53, TUMOR SUPPRESSOR, |
| | | | | | | | | | | MULTIGENE 2 FAMILY, NUCLEAR |
| | | | | | | | | | | PROTEIN, PHOSPHORYLATION, DISEASE |
| | | | | | | | | | | MUTATION, 3 POLYMORPHISM, |
| | | | | | | | | | | COMPLEX (ANTI-ONCOGENE/ANKYRIN |
| | | | | | | | | | | REPEATS)” |
| 372 | 1ycs | B | 1212 | 1297 | 3.40E−14 | 0.28 | −0.13 | | P53; CHAIN: A; 53BP2; | “COMPLEX (ANTI-ONCOGENE/ANKYRIN |
| | | | | | | | | | CHAIN: B; | REPEATS) P53BP2; ANKYRIN REPEATS, |
| | | | | | | | | | | SH3, P53, TUMOR SUPPRESSOR, |
| | | | | | | | | | | MULTIGENE 2 FAMILY, NUCLEAR |
| | | | | | | | | | | PROTEIN, PHOSPHORYLATION, DISEASE |
| | | | | | | | | | | MUTATION, 3 POLYMORPHISM, |
| | | | | | | | | | | COMPLEX (ANTI-ONCOGENE/ANKYRIN |
| | | | | | | | | | | REPEATS)” |
| 373 | 1btk | A | 51 | 97 | 0.00056 | −0.17 | 0.19 | | “BRUTON'S TYROSINE | “TRANSFERASE BRUTON'S |
| | | | | | | | | | KINASE; CHAIN: A, B;” | AGAMMAGLOBULINEMIA TYROSINE |
| | | | | | | | | | | KINASE, BTK; TRANSFERASE, PH |
| | | | | | | | | | | DOMAIN, BTK MOTIF, ZINC BINDING, X- |
| | | | | | | | | | | LINKED 2 AGAMMAGLOBULINEMIA, |
| | | | | | | | | | | TYROSINE-PROTEIN KINASE” |
| 373 | 1btn | | 51 | 137 | 1.40E−06 | 0.1 | 0.37 | | BETA-SPECTRIN; 1BTN 4 | SIGNAL TRANSDUCTION PROTEIN |
| | | | | | | | | | CHAIN: NULL; 1BTN 5 | |
| 373 | 1fao | A | 51 | 139 | 2.80E−14 | 0.25 | 0.86 | | DUAL ADAPTOR OF | “SIGNALING PROTEIN DAPP1, PHISH, |
| | | | | | | | | | PHOSPHOTYROSINE AND 3- | BAM32; PLECKSTRIN, 3- |
| | | | | | | | | | CHAIN: A; | PHOSPHOINOSITIDES, INOSITOL |
| | | | | | | | | | | TETRAKISPHOSPHATE 2 SIGNAL |
| | | | | | | | | | | TRANSDUCTION PROTEIN, ADAPTOR |
| | | | | | | | | | | PROTEIN” |
| 373 | 1fb8 | A | 51 | 139 | 2.80E−14 | 0.38 | 0.89 | | DUAL ADAPTOR OF | “SIGNALING PROTEIN DAPP1, PHISH, |
| | | | | | | | | | PHOSPHOTYROSINE AND 3- | BAM32; PLECKSTRIN, 3- |
| | | | | | | | | | CHAIN: A; | PHOSPHOINOSITDES, INOSITOL |
| | | | | | | | | | | TETRAKISPHOSPHATE 2 SIGNAL |
| | | | | | | | | | | TRANSDUCTION PROTEIN, ADAPTOR |
| | | | | | | | | | | PROTEIN” |
| 373 | 1pls | | 51 | 138 | 1.40E−11 | 0.17 | 0.06 | | | “PHOSPHORYLATION PLECKSTRIN (N- |
| | | | | | | | | | | TERMINAL PLECKSTRIN HOMOLOGY |
| | | | | | | | | | | DOMAIN) MUTANT 1PLS 3 WITH LEU GLU |
| | | | | | | | | | | (HIS)6 ADDED TO THE C TERMINUS 1PLS |
| | | | | | | | | | | 4 (INS(G105-LEHHHHHH)) (NMR, 25 |
| | | | | | | | | | | STRUCTURES) 1PLS 5” |
| 374 | 1sp2 | | 1813 | 1839 | 0.0028 | −0.51 | 0.68 | | SP1F2; CHAIN: NULL; | “ZINC FINGER TRANSCRIPTION FACTOR |
| | | | | | | | | | | SP1; ZINC FINGER, TRANSCRIPTION |
| | | | | | | | | | | ACTIVATION, SP1” |
| 374 | 1sp2 | | 1813 | 1839 | 0.0028 | −0.51 | 0.68 | | SP1F2; CHAIN: NULL; | “ZINC FINGER TRANSCRIPTION FACTOR |
| | | | | | | | | | | SP1; ZINC FINGER, TRANSCRIPTION |
| | | | | | | | | | | ACTIVATION, SP1” |
| 375 | 1a81 | A | 123 | 205 | 4.20E−19 | 0.62 | 1 | | “SYK KINASE; CHAIN: A, C, | “COMPLEX (TRANSFERASE/PEPTIDE) |
| | | | | | | | | | E, G, I, K; T-CELL SURFACE | ITAM PEPTIDE; COMPLEX |
| | | | | | | | | | GLYCOPROTEIN CD3 | (TRANSFERASE/PEPTIDE), SYK, KINASE, |
| | | | | | | | | | EPSILON CHAIN; CHAIN: B, | SH2 DOMAIN, ITAM” |
| | | | | | | | | | D, F, H, J, L;” | |
| 375 | 1a81 | E | 123 | 204 | 1.40E−18 | 0.57 | 0.92 | | “SYK KINASE; CHAIN: A, C, | “COMPLEX (TRANSFERASE/PEPTIDE) |
| | | | | | | | | | E, G, I, K; T-CELL SURFACE | ITAM PEPTIDE; COMPLEX |
| | | | | | | | | | GLYCOPROTEIN CD3 | (TRANSFERASE/PEPTDE), SYK, KINASE, |
| | | | | | | | | | EPSILON CHAIN; CHAIN: B, | SH2 DOMAIN, ITAM” |
| | | | | | | | | | D, F, H, J, L;” | |
| 375 | 1ab2 | | 120 | 221 | 1.40E−19 | 0.4 | 1 | | | “TRANSFERASE(PHOSPHOTRANSFERASE) |
| | | | | | | | | | | PROTO-ONCOGENE TYROSINE KINASE |
| | | | | | | | | | | (E.C.2.7.1.112) 1AB2 3 (SRC HOMOLOGY 2 |
| | | | | | | | | | | DOMAIN) (““ABELSON””, SH2 ABL) 1AB2 4 |
| | | | | | | | | | | (NMR, 20 STRUCTURES 1AB2 5” |
| 375 | 1ab2 | | 112 | 220 | 1.40E−19 | | | 51.36 | | “TRANSFERASE(PHOSPHOTRANSFERASE) |
| | | | | | | | | | | PROTO-ONCOGENE TYROSINE KINASE |
| | | | | | | | | | | (E.C.2.7.1.112) 1AB2 3 (SRC HOMOLOGY 2 |
| | | | | | | | | | | DOMAIN) (““ABELSON””, SH2 ABL) 1AB2 4 |
| | | | | | | | | | | (NMR, 20 STRUCTURES) 1AB2 5” |
| 375 | 1aya | A | 124 | 217 | 4.20E−22 | 0.78 | 1 | | | “HYDROLASE(SH2 DOMAIN) TYROSINE |
| | | | | | | | | | | PHOSPHATASE SYP (N-TERMINAL SH2 |
| | | | | | | | | | | DOMAIN) 1AYA 3 (PTP1D, SHPTP2) |
| | | | | | | | | | | (E.C.3.1.3.48) COMPLEXED WITH THE |
| | | | | | | | | | | PEPTIDE 1AYA 4 PDGFR-1009 1AYA 5” |
| 375 | 1dlz | B | 127 | 219 | 4.20E−21 | 0.26 | 1 | | “SAP SH2 DOMAIN; CHAIN: | GENE REGULATION SH2 DOMAINS |
| | | | | | | | | | A, B, C, D;” | |
| 375 | 1d4t | A | 123 | 219 | 4.20E−20 | 0.23 | 1 | | T CELL SIGNAL | “SIGNALING PROTEIN SLAM; SH2 |
| | | | | | | | | | TRANSDUCTION | DOMAIN, TYROSINE KINASE, SIGNAL |
| | | | | | | | | | MOLECULE SAP; CHAIN: A; | TRANSDUCTION, PEPTIDE 2 |
| | | | | | | | | | SIGNALING LYMPHOCYTIC | RECOGNITION” |
| | | | | | | | | | ACTIVATION MOLECULE; | |
| | | | | | | | | | CHAIN: B; | |
| 375 | 1lkk | A | 123 | 217 | 1.40E−18 | 0.26 | 1 | | HUMAN P56 TYROSINE | COMPLEX (TYROSINE KINASE/PEPTIDE) |
| | | | | | | | | | KINASE; 1LKK7 CHAIN: A; | |
| | | | | | | | | | 1LKK 8 PHOSPHOTYROSYL | |
| | | | | | | | | | PEPTIDE AC-PTYR-GLU- | |
| | | | | | | | | | GLU-ILE; 1LKK 11 CHAIN: B; | |
| | | | | | | | | | 1LKK 12 | |
| 375 | 1qgl | E | 123 | 219 | 8.40E−21 | 0.58 | 0.99 | | GROWTH FACTOR | “HORMONE/GROWTH FACTOR GRB2-SH2; |
| | | | | | | | | | RECEPTOR BINDING | SIGNAL TRANSDUCTION, SH2 DOMAIN, |
| | | | | | | | | | PROTEIN; CHAIN: E; SHC- | PHOSPHOTYROSYL PEPTIDE, 2 COMPLEX |
| | | | | | | | | | DERIVED PEPTIDE; CHAIN: | (SIGNAL TRANSDUCTION/PEPTIDE), |
| | | | | | | | | | I; | HORMONE/GROWTH FACTOR” |
| 375 | 1qgl | E | 123 | 224 | 8.40E−21 | | | 51.7 | GROWTH FACTOR | “HORMONE/GROWTH FACTOR GRB2-SH2; |
| | | | | | | | | | RECEPTOR BINDING | SIGNAL TRANSDUCTION, SH2 DOMAIN, |
| | | | | | | | | | PROTEIN; CHAIN: E; SHC- | PHOSPHOTYROSYL PEPTIDE, 2 COMPLEX |
| | | | | | | | | | DERIVED PEPTIDE; CHAIN: | (SIGNAL TRANSDUCTION/PEPTIDE), |
| | | | | | | | | | I; | HORMONE/GROWTH FACTOR” |
| 375 | 1sha | A | 123 | 205 | 2.80E−18 | 0.52 | 1 | | | “PHOSPHOTRANSFERASE V-SRC |
| | | | | | | | | | | TYROSINE KINASE TRANSFORMING |
| | | | | | | | | | | PROTEIN (PHOSPHOTYROSINE 1SHA 3 |
| | | | | | | | | | | RECOGNITION DOMAIN SH2) |
| | | | | | | | | | | (E.C.2.7.1.112) COMPLEX WITH 1SHA 4 |
| | | | | | | | | | | PHOSPHOPEPTIDE A (TYR-VAL-PRO-MET- |
| | | | | | | | | | | LEU, PHOSPHORYLATED TYR) 1SHA 5” |
| 375 | 3hck | | 123 | 219 | 2.80E−18 | 0.31 | 0.99 | | HCK SH2; CHAIN: NULL; | “TRANSFERASE HCK, SH2, TYROSINE |
| | | | | | | | | | | KINASE, SIGNAL TRANSDUCTION, |
| | | | | | | | | | | TRANSFERASE” |
| 376 | 1pbw | B | 99 | 193 | 7.00E−20 | −0.05 | 0.29 | | “PHOSPHATIDYLINOSITOL | “PHOSPHOTRANSFERASE RHOGAP |
| | | | | | | | | | 3-KINASE; CHAIN: A, B;” | DOMAIN; PHOSPHOTRANSFERASE, |
| | | | | | | | | | | TPASE ACTIVATING PROTEIN, GAP, |
| | | | | | | | | | | CDC42, 2 PHOSPHOINOSITIDE 3-KINASE, |
| | | | | | | | | | | SH3 DOMAIN, SH2 DOMAIN, 3 SIGNAL |
| | | | | | | | | | | TRANSDUCTION” |
| 376 | 1pbw | A | 99 | 193 | 1.30E−19 | −0.41 | 0.46 | | “PHOSPHATIDYLINOSITOL | “PHOSPHOTRANSFERASE RHOGAP |
| | | | | | | | | | 3-KINASE; CHAIN: A, B;” | DOMAIN; PHOSPHOTRANSFERASE, |
| | | | | | | | | | | TPASE ACTIVATING PROTEIN, GAP, |
| | | | | | | | | | | CDC42, 2 PHOSPHOINOSITIDE 3-KINASE, |
| | | | | | | | | | | SH3 DOMAIN, SH2 DOMAIN, 3 SIGNAL |
| | | | | | | | | | | TRANSDUCTION” |
| 376 | 1rgp | | 89 | 193 | 1.10E−23 | −0.01 | 0.8 | | RHOGAP; CHAIN: NULL; | “G-PROTEIN CDC42 GTPASE-ACTIVATING |
| | | | | | | | | | | PROTEIN; G-PROTEIN, GAP, SIGNAL- |
| | | | | | | | | | | TRANSDUCTION” |
| 376 | 1tx4 | A | 89 | 193 | 4.20E−24 | 0.38 | 0.99 | | P50-RHOGAP; CHAIN: A; | “COMPLEX(GTPASE ACTLVATN/PROTO- |
| | | | | | | | | | TRANSFORMING PROTEIN | ONCOGENE) GTPASE-ACTIVATING |
| | | | | | | | | | RHOA; CHAIN: B; | PROTEIN RHOGAP; COMPLEX (GTPASE |
| | | | | | | | | | | ACTIVATION/PROTO-ONCOGENE), |
| | | | | | | | | | | GTPASE, 2 TRANSITION STATE, GAP” |
| 379 | 1cp2 | A | 97 | 310 | 6.80E−50 | −0.02 | 0.43 | | “NITROGENASE IRON | “OXIDOREDUCTASE CP2; |
| | | | | | | | | | PROTEIN; CHAIN: A, B;” | OXIDOREDUCTASE, NITROGENASE IRON |
| | | | | | | | | | | PROTEIN HEADER CONECT LINK” |
| 379 | 1cp2 | A | 66 | 319 | 6.80E−50 | | | 56.94 | “NITROGENASE IRON | “OXIDOREDUCTASE CP2; |
| | | | | | | | | | PROTEIN; CHAIN: A, B;” | OXIDOREDUCTASE, NITROGENASE IRON |
| | | | | | | | | | | PROTEIN HEADER CONECT LINK” |
| 379 | 1f48 | A | 61 | 251 | 2.60E−23 | −0.05 | 0.58 | | ARSENITE- | “HYDROLASE ARSA ATPASE; P-LOOP, |
| | | | | | | | | | TRANSLOCATING ATPASE; | ANTIMONITE BINDING SITE, ATP |
| | | | | | | | | | CHAIN: A; | BINDING SITE” |
| 379 | 2ffh | A | 43 | 314 | 6.50E−31 | −0.24 | 0.01 | | “FFH; CHAIN: A, B, C;” | “PROTEIN TRANSPORT FIFTY-FOUR |
| | | | | | | | | | | HOMOLOG, P48; FFH, SRP54, SIGNAL |
| | | | | | | | | | | RECOGNITION PARTICLE, GTPASE, M |
| | | | | | | | | | | DOMAIN, 2 RNA-BINDING, SIGNAL |
| | | | | | | | | | | SEQUENCE-BINDING, HELIX-TURN- |
| | | | | | | | | | | HELIX, 3 PROTEIN TARGETING, PROTEIN |
| | | | | | | | | | | TRANSPORT” |
| 379 | 2nip | A | 95 | 312 | 5.10E−51 | −0.36 | 0.51 | | “NITROGENASE IRON | “IRON PROTEIN IRON PROTEIN, |
| | | | | | | | | | PROTEIN; CHAIN: A, B;” | OXIDOREDUCTASE” |
| 379 | 2nip | B | 95 | 312 | 5.10E−51 | −0.17 | 0.36 | | “NITROGENASE IRON | “IRON PROTEIN IRON PROTEIN, |
| | | | | | | | | | PROTEIN; CHAIN: A, B;” | OXIDOREDUCTASE” |
| 379 | 2nip | A | 65 | 319 | 5.10E−51 | | | 50.57 | “NITROGENASE IRON | “IRON PROTEIN IRON PROTEIN, |
| | | | | | | | | | PROTEIN; CHAIN: A, B;” | OXIDOREDUCTASE” |
| 387 | 1b57 | A | 117 | 209 | 0.0014 | −0.46 | 0.09 | | “FRUCTOSE-BISPHOSPHATE | “LYASE LYASE, ALDEHYDE, |
| | | | | | | | | | ALDOLASE II; CHAIN: A, B;” | GLYCOLYSIS” |
| 387 | 2dub | A | 119 | 348 | 2.60E−24 | −0.16 | 0.25 | | “2-ENOYL-COA | “LYASE CROTONASE, ENOYL-COA |
| | | | | | | | | | HYDRATASE; CHAIN: A, B, | HYDRATASE 1; LYASE, HYDRATASE, B- |
| | | | | | | | | | C, D, E, F;” | OXIDATION, FATTY ACID |
| | | | | | | | | | | DEGRADATION, COA, 2 LIGAND |
| | | | | | | | | | | BINDING” |
| 390 | 1a4i | A | 37 | 332 | 1.00E−97 | 0.64 | 1 | | “METHYLENETETRAHYDROFOLATE | “OXIDOREDUCTASE METHYLENETHF |
| | | | | | | | | | DEHYDROGENASE/CHAIN: | DEHYDROGENASE/METHENYLTHF THF, |
| | | | | | | | | | A, B;” | BIFUNCTIONAL, DEHYDROGENASE, |
| | | | | | | | | | | CYCLOHYDROLASE, FOLATE, 2 |
| | | | | | | | | | | OXIDOREDUCTASE HEADER” |
| 390 | 1a4i | A | 35 | 333 | 1.00E−97 | | | 206.73 | “METHYLENETETRAHYDROFOLATE | “OXIDOREDUCTASE METHYLENETHF |
| | | | | | | | | | DEHYDROGENASE/CHAIN: | DEHYDROGENASE/METHENYLTHF THF, |
| | | | | | | | | | A, B;” | BIFUNCTIONAL, DEHYDROGENASE, |
| | | | | | | | | | | CYCLOHYDROLASE, FOLATE, 2 |
| | | | | | | | | | | OXIDOREDUCTASE HEADER” |
| 390 | 1b0a | A | 37 | 328 | 0 | 0.83 | 1 | | FOLD BIFUNCTIONAL | “OXIDOREDUCTASE,HYDROLASE |
| | | | | | | | | | PROTEIN; CHAIN: A; | FOLATE, DEHYDROGENASE, |
| | | | | | | | | | | CYCLCOHYDROLASE, BIFUNCTIONAL, 2 |
| | | | | | | | | | | CHANNELING, |
| | | | | | | | | | | OXIDOREDUCTASE,HYDROLASE” |
| 390 | 1b0a | A | 36 | 337 | 0 | | | 247.92 | FOLD BIFUNCTIONAL | “OXIDOREDUCTASE,HYDROLASE |
| | | | | | | | | | PROTEIN; CHAIN: A; | FOLATE, DEHYDROGENASE, |
| | | | | | | | | | | CYCLCOHYDROLASE, BIFUNCTIONAL, 2 |
| | | | | | | | | | | CHANNELING, |
| | | | | | | | | | | OXIDOREDUCTASE,HYDROLASE” |
| 393 | 1poi | A | 40 | 343 | 3.40E−41 | | | 59.13 | “GLUTACONATE | “TRANSFERASE TRANSFERASE, COA, |
| | | | | | | | | | COENZYME A- | GLUTAMATE, PROTEIN FERMENTATION” |
| | | | | | | | | | TRANSFERASE; CHAIN: A, | |
| | | | | | | | | | B, C, D;” | |
| 394 | 2abx | A | 48 | 128 | 0.0021 | −0.3 | 0.07 | | | POSTSYNAPTIC NEUROTOXIN ALPHA- |
| | | | | | | | | | | *BUNGAROTOXIN 2ABX 4 |
| 397 | 1ail | L | 35 | 258 | 5.10E−78 | | | 55.09 | “FAB59.1; CHAIN: L, H; | “COMPLEX (ANTIBODY/PEPTIDE) |
| | | | | | | | | | AIB142; CHAIN: P;” | COMPLEX (ANTIBODY/PEPTIDE), |
| | | | | | | | | | | ANTIBODY, CONSTRAINED HIV-1 V3 2 |
| | | | | | | | | | | LOOP PEPTIDE, IMMUNOGLOBULIN” |
| 397 | 1b4j | L | 35 | 256 | 1.70E−73 | | | 55.27 | “ANTIBODY; CHAIN: L, H;” | “ANTIBODY ENGINEERING ANTIBODY |
| | | | | | | | | | | ENGINEERING, HUMANIZED AND |
| | | | | | | | | | | CHIMERIC ANTIBODIES, 2 FAB, X-RAY |
| | | | | | | | | | | STRUCTURES, GAMMA-INTERFERON” |
| 397 | 1b6d | A | 35 | 254 | 3.40E−82 | | | 54.84 | “IMMUNOGLOBULIN; | “IMMUNOGLOBULIN |
| | | | | | | | | | CHAIN: A, B;” | IMMUNOGLOBULIN, KAPPA LIGHT- |
| | | | | | | | | | | CHAIN DIMER HEADER” |
| 397 | 1baf | L | 35 | 261 | 1.70E−74 | | | 54.63 | | “IMMUNOGLOBULIN FAB FRAGMENT OF |
| | | | | | | | | | | MURINE MONOCLONAL ANTIBODY AN02 |
| | | | | | | | | | | COMPLEX 1BAF 3 WITH ITS HAPTEN |
| | | | | | | | | | | (2,2,6,6-TETRAMETHYL-1- |
| | | | | | | | | | | PIPERIDINYLOXY-1BAF 4 |
| | | | | | | | | | | DINITROPHENYL) 1BAF 5” |
| 397 | 1bj1 | L | 35 | 255 | 1.40E−84 | | | 59.19 | “FAB FRAGMENT; CHAIN: L, | “COMPLEX (ANTIBODY/ANTIGEN)FAB- |
| | | | | | | | | | H, J, K; VASCULAR | 12; VEGF; COMPLEX |
| | | | | | | | | | ENDOTHELIAL GROWTH | (ANTIBODY/ANTIGEN), ANGIOGENIC |
| | | | | | | | | | FACTOR; CHAIN: V, W;” | FACTOR” |
| 397 | 1bjm | A | 33 | 257 | 3.40E−43 | | | 53.97 | “LOC-LAMBDA 1 TYPE | “IMMUNOGLOBULIN BENCE-JONES |
| | | | | | | | | | LIGHT-CHAIN DIMER; 1BJM | PROTEIN; 1BJM 8 BENCE JONES, |
| | | | | | | | | | 6 CHAIN: A, B; 1BJM 7” | ANTIBODY, MULTIPLE QUATERNARY |
| | | | | | | | | | | STRUCTURES 1BJM 13” |
| 397 | 1bz7 | B | 34 | 253 | 3.40E−13 | | | 55.47 | ANTIBODY R24 (LIGHT | “IMMUNE SYSTEM ANTIBODY (FAB |
| | | | | | | | | | CHAIN); CHAIN: A; | FRAGMENT), IMMUNE SYSTEM” |
| | | | | | | | | | ANTIBODY R24 (HEAVY | |
| | | | | | | | | | CHAIN); CHAIN: B; | |
| 397 | 1cly | H | 34 | 258 | 8.50E−13 | | | 55.85 | “IGG FAB (HUMAN IGG1, | “IMMUNOGLOBULIN CBR96 FAB |
| | | | | | | | | | KAPPA); CHAIN: L, H;” | (IMMUNOGLOBULIN); |
| | | | | | | | | | | IMMUNOGLOBULIN, IMMUNOGLOBULIN |
| | | | | | | | | | | C REGION, GLYCOPROTEIN, ANTIB” |
| 397 | 1fbi | H | 34 | 253 | 1.40E−14 | | | 55.78 | | COMPLEX (ANTIBODY/ANTIGEN) FAB |
| | | | | | | | | | | FRAGMENT OF THE MONOCLONAL |
| | | | | | | | | | | ANTIBODY F9.13.7 (IGG1) 1FBI3 |
| | | | | | | | | | | COMPLEXED WITH LYSOZYME |
| | | | | | | | | | | (E.C.3.2.1.17) 1FBI4 |
| 397 | 1fig | L | 35 | 261 | 3.40E−79 | | | 56.99 | | IMMUNOGLOBULIN IMMUNOGLOBULIN |
| | | | | | | | | | | G1 (KAPPA LIGHT CHAIN) FAB' |
| | | | | | | | | | | FRAGMENT 1FIG 3 |
| 397 | 1gc1 | L | 35 | 255 | 1.40E−76 | | | 57.05 | “ENVELOPE PROTEIN | “COMPLEX (HIV ENVELOPE |
| | | | | | | | | | GP120; CHAIN: G; CD4; | PROTEIN/CD4/FAB) COMPLEX (HIV |
| | | | | | | | | | CHAIN: C; ANTIBODY 17B; | ENVELOPE PROTEIN/CD4/FAB), HIV-1 |
| | | | | | | | | | CHAIN: L, H;” | EXTERIOR 2 ENVELOPE GP120, T-CELL |
| | | | | | | | | | | SURFACE GLYCOPROTEIN CD4, 3 |
| | | | | | | | | | | ANTIGEN-BINDING FRAGMENT OF |
| | | | | | | | | | | HUMAN IMMUNOGLOBULIN 17B, 4 |
| | | | | | | | | | | GLYCOSYLATED PROTEIN” |
| 397 | 1iai | L | 35 | 261 | 5.10E−78 | | | 54.53 | “IDIOTYPIC FAB 730.1.4 | COMPLEX (IMMUNOGLOBULIN |
| | | | | | | | | | (IGG1) OF VIRUS 1IAI 5 | IGG1/IGG2A) |
| | | | | | | | | | CHAIN: L, H; 1IAI 7 ANTI- | |
| | | | | | | | | | IDIOTYPIC FAB 409.5.3 | |
| | | | | | | | | | (IGG2A); 1IAI 9 CHAIN: M, I | |
| | | | | | | | | | 1IAI 10” | |
| 397 | 1iai | H | 35 | 249 | 3.40E−17 | | | 55.12 | “IDIOTYPIC FAB 730.1.4 | COMPLEX (IMMUNOGLOBULIN |
| | | | | | | | | | (IGG1) OF VIRUS 1IAI 5 | IGG1/IGG2A) |
| | | | | | | | | | CHAIN: L, H; 1IAI 7 ANTI- | |
| | | | | | | | | | IDIOTYPIC FAB 409.5.3 | |
| | | | | | | | | | (IGG2A); 1IAI 9 CHAIN: M, I | |
| | | | | | | | | | 1IAI 10” | |
| 397 | 1igc | H | 34 | 256 | 3.40E−13 | | | 53.87 | | “COMPLEX (ANTIBODY/BINDING |
| | | | | | | | | | | PROTEIN) IGG1 FAB FRAGMENT |
| | | | | | | | | | | COMPLEXED WITH PROTEIN G (DOMAIN |
| | | | | | | | | | | III) 1IGC 5 PROTEIN G, STREPTOCOCCUS |
| | | | | | | | | | | 1IGC 15” |
| 397 | 1igt | A | 35 | 261 | 1.70E−82 | | | 56.11 | “IGG2A INTACT ANTIBODY- | “IMMUNOGLOBULIN INTACT |
| | | | | | | | | | MAB231; CHAIN: A, B, C, | IMMUNOGLOBULIN V REGION C |
| | | | | | | | | | D” | REGION, IMMUNOGLOBULIN” |
| 397 | 1psk | L | 35 | 261 | 6.80E−75 | | | 54.63 | “ANTIBODY; CHAIN: L, H;” | “IMMUNOGLOBULIN FAB, GD2- |
| | | | | | | | | | | GANGLIOSIDE, CARBOHYDRATE, |
| | | | | | | | | | | MELANOMA, IMMUNOGLOBULIN” |
| 397 | 1vge | H | 34 | 261 | 3.40E−19 | | | 55.63 | “TR1.9 FAB; CHAIN: L, H;” | “IMMUNOGLOBULIN TR1.9, ANTI- |
| | | | | | | | | | | THYROID PEROXIDASE, |
| | | | | | | | | | | AUTOANTIBODY, 2 IMMUNOGLOBULIN” |
| 397 | 2fgw | L | 35 | 261 | 3.40E−85 | | | 56.67 | | IMMUNOGLOBULIN FAB FRAGMENT OF |
| | | | | | | | | | | A HUMANIZED VERSION OF THE ANTI- |
| | | | | | | | | | | CD18 2FGW 3 ANTIBODY ‘H52’ (HUH52-OZ |
| | | | | | | | | | | FAB) 2FGW 4 |
| 397 | 2hrp | H | 34 | 255 | 5.10E−11 | | | 53.98 | “MONOCLONAL ANTIBODY | “COMPLEX |
| | | | | | | | | | F11.2.32; CHAIN: L, H, M, N; | (IMMUNOGLOBULIN/PEPTIDE) |
| | | | | | | | | | HIV-1 PROTEASE PEPTIDE; | IMMUNOGLOBULIN, IGG1; FAB |
| | | | | | | | | | CHAIN: P, Q;” | FRAGMENT, CROSS-REACTIVITY, HIV1 |
| | | | | | | | | | | PROTEASE, ENZYME 2 INHIBITION, |
| | | | | | | | | | | COMPLEX |
| | | | | | | | | | | (IMMUNOGLOBULIN/PEPTIDE)” |
| 397 | 2mcg | 1 | 33 | 257 | 3.40E−45 | | | 56.28 | | IMMUNOGLOBULIN IMMUNOGLOBULIN |
| | | | | | | | | | | LAMBDA LIGHT CHAIN DIMER (/MCG$) |
| | | | | | | | | | | 2MCG 3 (TRIGONAL FORM) 2MCG 4 |
| 403 | 1a4j | L | 22 | 232 | 1.60E−39 | | | 75.47 | “IMMUNOGLOBULIN, DIELS | “IMMUNOGLOBULIN |
| | | | | | | | | | ALDER CATALYTIC | IMMUNOGLOBULIN, ANTIBODY, |
| | | | | | | | | | ANTIBODY; CHAIN: L, H, A, | CATALYTIC ANTIBODY, DIELS ALDER, 2 |
| | | | | | | | | | B;” | GERMLINE” |
| 403 | 1afv | L | 22 | 234 | 9.60E−40 | | | 74.25 | “HUMAN | “COMPLEX (VIRAL |
| | | | | | | | | | IMMUNODEFICIENCY | CAPSID/IMMUNOGLOBULIN) HIV-1 CA, |
| | | | | | | | | | VIRUS TYPE 1 CAPSID | HIV CA, HIV P24, P24; FAB, FAB LIGHT |
| | | | | | | | | | CHAIN: A, B; ANTIBODY | CHAIN, FAB HEAVY CHAIN COMPLEX |
| | | | | | | | | | FAB25.3 FRAGMENT; | (VIRAL CAPSID/IMMUNOGLOBULIN), |
| | | | | | | | | | CHAIN: H, K, L, M;” | HIV, CAPSID PROTEIN, 2 P24” |
| 403 | 1ai1 | L | 22 | 232 | 1.60E−42 | | | 76.61 | “FAB59.1; CHAIN: L, H; | “COMPLEX (ANTIBODY/PEPTIDE) |
| | | | | | | | | | AIB142; CHAIN: P;” | COMPLEX (ANTIBODY/PEPTIDE), |
| | | | | | | | | | | ANTIBODY, CONSTRAINED HIV-1 V3 2 |
| | | | | | | | | | | LOOP PEPTIDE, IMMUNOGLOBULIN” |
| 403 | 1axt | L | 22 | 232 | 1.60E−40 | | | 74.4 | “IMMUNOGLOBULIN | “IMMUNOGLOBULIN |
| | | | | | | | | | IGG2A; CHAIN: L, H;” | IMMUNOGLOBULIN, ANTIBODY FAB', |
| | | | | | | | | | | CATALYST, ALDOLASE REACTION” |
| 403 | 1b2w | L | 22 | 234 | 3.20E−39 | | | 74.47 | ANTIBODY (LIGHT CHAIN); | “IMMUNE SYSTEM IMMUNOGLOBULIN; |
| | | | | | | | | | CHAIN: L; ANTIBODY | IMMUNOGLOBULIN ANTIBODY |
| | | | | | | | | | (HEAVY CHAIN); CHAIN: H; | ENGINEERING, HUMANIZED AND |
| | | | | | | | | | | CHIMERIC ANTIBODY, FAB, 2 X-RAY |
| | | | | | | | | | | STRUCTURE, THREE-DIMENSIONAL |
| | | | | | | | | | | STRYCTURE, GAMMA-3 INTERFERON, |
| | | | | | | | | | | IMMUNE SYSTEM” |
| 403 | 1baf | H | 22 | 237 | 9.60E−13 | | | 73.72 | | “IMMUNOGLOBULIN FAB FRAGMENT OF |
| | | | | | | | | | | MURINE MONOCLONAL ANTIBODY AN02 |
| | | | | | | | | | | COMPLEX 1BAF 3 WITH ITS HAPTEN |
| | | | | | | | | | | (2,2,6,6-TETRAMETHYL-1- |
| | | | | | | | | | | PIPERIDINYLOXY-1BAF 4 |
| | | | | | | | | | | DINITROPHENYL) 1BAF 5” |
| 403 | 1bbj | L | 22 | 232 | 1.60E−37 | | | 75.08 | | IMMUNOGLOBULIN FAB' FRAGMENT OF |
| | | | | | | | | | | MONOCLONAL ANTIBODY B72.3 1BBJ 3 |
| | | | | | | | | | | (MURINE/HUMAN CHIMERA) 1BBJ 4 |
| 403 | 1bog | A | 22 | 234 | 3.20E-36 | | | 73.51 | “ANTIBODY (CR 4-1); | “COMPLEX (ANTIBODY/PEPTIDE) |
| | | | | | | | | | CHAIN: A, B; PEPTIDE; | POLYSPECIFICITY, CROSS REACTIVITY, |
| | | | | | | | | | CHAIN: C;” | FAB-FRAGMENT, PEPTIDE, 2 HIV-1, |
| | | | | | | | | | | COMPLEX (ANTIBODY/PEPTIDE)” |
| 403 | 1bql | H | 25 | 234 | 9.60E−15 | | | 73.27 | | COMPLEX (ANTIBODY/ANTIGEN) |
| | | | | | | | | | | HYHEL-5 FAB COMPLEXED WITH |
| | | | | | | | | | | BOBWHITE QUAIL LYSOZYME 1BQL 3 |
| | | | | | | | | | | 1BQL 95 |
| 403 | 1cel | L | 22 | 232 | 4.80E−38 | | | 72.4 | CAMPATH-1H: LIGHT | “ANTIBODY THERAPEUTIC, ANTIBODY, |
| | | | | | | | | | CHAIN; CHAIN: L; | CD52” |
| | | | | | | | | | CAMPATH-1H: HEAVY | |
| | | | | | | | | | CHAIN; CHAIN: H; PEPTIDE | |
| | | | | | | | | | ANTIGEN; CHAIN: P; | |
| 403 | 1gcl | L | 22 | 232 | 6.40E−38 | | | 75.21 | “ENVELOPE PROTEIN | “COMPLEX (HIV ENVELOPE |
| | | | | | | | | | GP120; CHAIN: G; CD4; | PROTEIN/CD4/FAB) COMPLEX (HIV |
| | | | | | | | | | CHAIN: C; ANTIBODY 17B; | ENVELOPE PROTEIN/CD4/FAB), HIV-1 |
| | | | | | | | | | CHAIN: L, H;” | EXTERIOR 2 ENVELOPE GP120, T-CELL |
| | | | | | | | | | | SURFACE GLYCOPROTEIN CD4, 3 |
| | | | | | | | | | | ANTIGEN-BINDING FRAGMENT OF |
| | | | | | | | | | | HUMAN IMMUNOGLOBULIN 17B, 4 |
| | | | | | | | | | | GLYCOSYLATED PROTEIN” |
| 403 | 1hil | A | 22 | 232 | 1.60E−41 | | | 73.4 | | IMMUNOGLOBULIN IGG2A FAB |
| | | | | | | | | | | FRAGMENT (FAB 17/9) 1HIL 3 |
| 403 | 1hyx | L | 22 | 232 | 9.60E−41 | | | 76.4 | “IMMUNOGLOBULIN 6D9; | “CATALYTIC ANTIBODY CATALYTIC |
| | | | | | | | | | CHAIN: L, H;” | ANTIBODY 6D9 CATALYTIC ANTIBODY, |
| | | | | | | | | | | ESTER HYDROLYSIS, ESTEROLYTIC, FAB, |
| | | | | | | | | | | 2 IMMUNOGLOBULIN” |
| 403 | 1igc | L | 22 | 234 | 8.00E−40 | | | 73.05 | | “COMPLEX (ANTIBODY/BINDING |
| | | | | | | | | | | PROTEIN) IGG1 FAB FRAGMENT |
| | | | | | | | | | | COMPLEXED WITH PROTEIN G (DOMAIN |
| | | | | | | | | | | III) 1IGC 5 PROTEIN G, STREPTOCOCCUS |
| | | | | | | | | | | 1IGC 15” |
| 403 | 1igf | L | 22 | 234 | 4.80E−41 | | | 74.75 | | IMMUNOGLOBULIN IGG1 FAB' |
| | | | | | | | | | | FRAGMENT (B13I2) 1IGF 3 |
| 403 | 1mcp | L | 22 | 234 | 1.10E−42 | | | 73.12 | | IMMUNOGLOBULIN IMMUNOGLOBULIN |
| | | | | | | | | | | FAB FRAGMENT (MC/PC$603) 1MCP 4 |
| 403 | 1nsn | L | 22 | 234 | 3.20E−42 | | | 73.78 | “IGG FAB (IGG1, KAPPA); | “COMPLEX |
| | | | | | | | | | 1NSN 4 CHAIN: L, H; 1NSN 5 | (IMMUNOGLOBULIN/HYDROLASE) N10 |
| | | | | | | | | | STAPHYLOCOCCAL | FAB IMMUNOGLOBULIN; 1NSN 7 |
| | | | | | | | | | NUCLEASE; 1NSN 9 CHAIN: | STAPHYLOCOCCAL NUCLEASE |
| | | | | | | | | | S; 1NSN 10” | RIBONUCLEATE, 1NSN 11 |
| | | | | | | | | | | IMMUNOGLOBULIN, STAPHYLOCOCCAL |
| | | | | | | | | | | NUCLEASE 1NSN 25” |
| 403 | 1qrn | D | 24 | 239 | 3.20E−12 | | | 79.43 | MHC CLASS I HLA-A; | “IMMUNE SYSTEM HUMAN |
| | | | | | | | | | CHAIN: A; BETA-2 | TCR/PEPTIDE/MHC COMPLEX, HLA-A2, |
| | | | | | | | | | MICROGLOBULIN; CHAIN: | HTLV-1, TAX, TCR, T 2 CELL RECEPTOR, |
| | | | | | | | | | B; TAX PEPTIDE P6A; | IMMUNE SYSTEM” |
| | | | | | | | | | CHAIN: C; HMAN T-CELL | |
| | | | | | | | | | RECEPTOR; CHAIN: D; HLA- | |
| | | | | | | | | | A 0201; CHAIN: E; | |
| 403 | 7fab | H | 20 | 232 | 6.40E−13 | | | 72.96 | | IMMUNOGLOBULIN IMMUNOGLOBULIN |
| | | | | | | | | | | FAB' NEW (LAMBDA LIGHT CHAIN) 7FAB3 |
| 409 | 1bu7 | A | 50 | 523 | 3.20E−71 | | | 217.68 | “CYTOCHROME P450; | “OXIDOREDUCTASE FATTY ACID |
| | | | | | | | | | CHAIN: A, B;” | HYDROXYLASE; FATTY ACID |
| | | | | | | | | | | MONOOXYGENASE, HEMOPROTEIN, P450 |
| | | | | | | | | | | REMARK” |
| 409 | 1oxa | | 101 | 518 | 1.40E−28 | | | 91.88 | CYTOCHROME P450 ERYF; | OXIDOREDUCTASE (OXYGENASE) |
| | | | | | | | | | 1OXA 5 CHAIN: NULL 1OXA 6 | |
| 410 | 1c28 | A | 157 | 288 | 1.40E−39 | | | 113.24 | “30 KD ADIPOCYTE | “SERUM PROTEIN ACRP30 C1Q TNF |
| | | | | | | | | | COMPLEMENT-RELATED | TRIMER ALL BETA, SERUM PROTEIN” |
| | | | | | | | | | PROTEIN CHAIN: A, B, C;” | |
| 410 | 1c28 | B | 162 | 274 | 3.20E−36 | | | 103.46 | “30 KD ADIPOCYTE | “SERUM PROTEIN ACRP30 C1Q TNF |
| | | | | | | | | | COMPLEMENT-RELATED | TRIMER ALL-BETA, SERUM PROTEIN” |
| | | | | | | | | | PROTEIN CHAIN: A, B, C;” | |
| 410 | 1c28 | C | 159 | 287 | 3.20E−28 | | | 80.55 | “30 KD ADIPOCYTE | “SERUM PROTEIN ACRP30 C1Q TNF |
| | | | | | | | | | COMPLEMENT-RELATED | TRIMER ALL-BETA, SERUM PROTEIN” |
| | | | | | | | | | PROTEIN CHAIN: A, B, C;” | |
| 412 | 1c28 | A | 199 | 333 | 3.20E−15 | | | 119.24 | “30 KD ADIPOCYTE | “SERUM PROTEIN ACRP30 C1Q TNF |
| | | | | | | | | | COMPLEMENT-RELATED | TRIMER ALL-BETA, SERUM PROTEIN” |
| | | | | | | | | | PROTEIN CHAIN: A, B, C;” | |
| 412 | 1c28 | B | 199 | 319 | 3.20E−13 | | | 104.74 | “30 KD ADIPOCYTE | “SERUM PROTEIN ACRP30 C1Q TNF |
| | | | | | | | | | COMPLEMENT-RELATED | TRIMER ALL-BETA, SERUM PROTEIN” |
| | | | | | | | | | PROTEIN CHAIN: A, B, C;” | |
| 412 | 1c28 | C | 199 | 332 | 3.20E−09 | | | 85.06 | “30 KD ADIPOCYTE | “SERUM PROTEIN ACRP30 C1Q TNF |
| | | | | | | | | | COMPLEMENT-RELATED | TRIMER ALL-BETA, SERUM PROTEIN” |
| | | | | | | | | | PROTEIN CHAIN: A, B, C;” | |
| 413 | 1c28 | A | 171 | 306 | 4.80E−20 | | | 61.4 | “30 KD ADIPOCYTE | “SERUM PROTEIN ACRP30 C1Q TNF |
| | | | | | | | | | COMPLEMENT-RELATED | TRIMER ALL-BETA, SERUM PROTEIN” |
| | | | | | | | | | PROTEIN CHAIN: A, B, C;” | |
| 413 | 1c28 | B | 180 | 292 | 8.00E−17 | | | 50.71 | “30 KD ADIPOCYTE | “SERUM PROTEIN ACRP30 C1Q TNF |
| | | | | | | | | | COMPLEMENT-RELATED | TRIMER ALL-BETA, SERUM PROTEIN” |
| | | | | | | | | | PROTEIN CHAIN: A, B, C;” | |
| 414 | 1hlg | A | 29 | 394 | 8.50E−89 | 0.83 | 1 | | “LIPASE, GASTRIC; CHAIN: | HYDROLASE LIPASE |
| | | | | | | | | | A, B;” | |
| 416 | 1a4y | A | 45 | 204 | 2.10E−18 | 0.13 | 0.41 | | “RIBONUCLEASE | “COMPLEX (INHIBITOR/NUCLEASE) |
| | | | | | | | | | INHIBITOR; CHAIN: A, D; | COMPLEX (INHIBITOR/NUCLEASE), |
| | | | | | | | | | ANGIOGENIN; CHAIN: B, E;” | COMPLEX (RI-ANG), HYDROLASE 2 |
| | | | | | | | | | | MOLECULAR RECOGNITION, EPITOPE |
| | | | | | | | | | | MAPPING, LEUCINE-RICH 3 REPEATS” |
| 416 | 1a4y | A | 48 | 232 | 6.30E−13 | −0.1 | 0.31 | | “RIBONUCLEASE | “COMPLEX (INHIBITOR/NUCLEASE) |
| | | | | | | | | | INHIBITOR; CHAIN: A, D; | COMPLEX (INHIBITOR/NUCLEASE), |
| | | | | | | | | | ANGIOGENIN; CHAIN: B, E;” | COMPLEX (RI-ANG), HYDROLASE 2 |
| | | | | | | | | | | MOLECULAR RECOGNITION, EPITOPE |
| | | | | | | | | | | MAPPING, LEUCINE-RICH 3 REPEATS” |
| 416 | 1a9n | A | 68 | 211 | 8.40E−21 | 0.64 | 0.7 | | “U2 RNA HAIRPIN IV; | “COMPLEX (NUCLEAR PROTEIN/RNA) |
| | | | | | | | | | CHAIN: Q, R; U2 A'; CHAIN: | COMPLEX (NUCLEAR PROTEIN/RNA), |
| | | | | | | | | | A, C; U2 B”; CHAIN: B, D;” | RNA, SNRNP, IBONUCLEOPROTEIN” |
| 416 | 1a9n | C | 68 | 211 | 1.00E−20 | 0.61 | 0.55 | | “U2 RNA HAIRPIN IV; | “COMPLEX (NUCLEAR PROTEIN/RNA) |
| | | | | | | | | | CHAIN: Q, R; U2 A'; CHAIN: | COMPLEX (NUCLEAR PROTEIN/RNA), |
| | | | | | | | | | A, C; U2 B”; CHAIN: B, D;” | RNA, SNRNP, IBONUCLEOPROTEIN” |
| 416 | 1a9n | C | 43 | 124 | 1.50E−07 | −0.09 | 0.07 | | “U2 RNA HAIRPIN IV; | “COMPLEX (NUCLEAR PROTEIN/RNA) |
| | | | | | | | | | CHAIN: Q, R; U2 A'; CHAIN: | COMPLEX (NUCLEAR PROTEIN/RNA), |
| | | | | | | | | | A, C; U2 B”; CHAIN: B, D;” | RNA, SNRNP, IBONUCLEOPROTEIN” |
| 416 | 1cs6 | A | 293 | 405 | 3.40E−12 | 0.01 | 0.37 | | AXONIN-1; CHAIN: A; | CELL ADHESION NEURAL CELL |
| | | | | | | | | | | ADHESION |
| 416 | 1cvs | D | 292 | 372 | 3.40E−11 | 0.13 | 0.4 | | “FIBROBLAST GROWTH | “GROWTH FACTOR/GROWTH FACTOR |
| | | | | | | | | | FACTOR 2; CHAIN: A, B; | RECEPTOR FGF, FGFR, |
| | | | | | | | | | FIBROBLAST GROWTH | IMMUNOGLOBULIN-LIKE, SIGNAL |
| | | | | | | | | | FACTOR RECEPTOR 1; | TRANSDUCTION, 2 DIMERIZATION, |
| | | | | | | | | | CHAIN: C, D;” | GROWTH FACTOR/GROWTH FACTOR |
| | | | | | | | | | | RECEPTOR” |
| 416 | 1cvs | C | 293 | 404 | 3.40E−10 | 0.04 | −0.05 | | “FIBROBLAST GROWTH | “GROWTH FACTOR/GROWTH FACTOR |
| | | | | | | | | | FACTOR 2; CHAIN: A, B; | RECEPTOR FGF, FGFR, |
| | | | | | | | | | FIBROBLAST GROWTH | IMMUNOGLOBULIN-LIKE, SIGNAL |
| | | | | | | | | | FACTOR RECEPTOR 1; | TRANSDUCTION, 2 DIMERIZATION, |
| | | | | | | | | | CHAIN: C, D;” | GROWTH FACTOR/GROWTH FACTOR |
| | | | | | | | | | | RECEPTOR” |
| 416 | 1cvs | D | 293 | 404 | 3.40E−10 | 0.01 | −0.13 | | “FIBROBLAST GROWTH | “GROWTH FACTOR/GROWTH FACTOR |
| | | | | | | | | | FACTOR 2; CHAIN: A, B; | RECEPTOR FGF, FGFR, |
| | | | | | | | | | FIBROBLAST GROWTH | IMMUNOGLOBULIN-LIKE, SIGNAL |
| | | | | | | | | | FACTOR RECEPTOR 1; | TRANSDUCTION, 2 DIMERIZATION, |
| | | | | | | | | | CHAIN: C, D;” | GROWTH FACTOR/GROWTH FACTOR |
| | | | | | | | | | | RECEPTOR” |
| 416 | 1d0b | A | 45 | 188 | 1.70E−18 | 0.7 | 1 | | INTERNALIN B; CHAIN: A; | “CELL ADHESION LEUCINE RICH |
| | | | | | | | | | | REPEAT, CALCIUM BINDING, CELL |
| | | | | | | | | | | ADHESION” |
| 416 | 1d0b | A | 54 | 225 | 1.00E−17 | 0.55 | 0.99 | | INTERNALIN B; CHAIN: A; | “CELL ADHESION LEUCINE RICH |
| | | | | | | | | | | REPEAT, CALCIUM BINDING, CELL |
| | | | | | | | | | | ADHESION” |
| 416 | 1d0b | A | 7 | 124 | 1.70E−13 | 0.59 | 0.76 | | INTERNALIN B; CHAIN: A; | “CELL ADHESION LEUCINE RICH |
| | | | | | | | | | | REPEAT, CALCIUM BINDING, CELL |
| | | | | | | | | | | ADHESION” |
| 416 | 1dce | A | 34 | 121 | 8.50E−09 | 0.26 | 0.28 | | “RAB | “TRANSFERASE CRYSTAL STRUCTURE, |
| | | | | | | | | | GERANYLGERANYLTRANSFERASE | RAB GERANYLGERANYLTRANSFERASE, |
| | | | | | | | | | ALPHA SUBUNIT; | 2.0 A 2 RESOLUTION, N- |
| | | | | | | | | | CHAIN: A, C; RAB | FORMYLMETHIONINE, ALPHA SUBUNIT, |
| | | | | | | | | | GERANYLGERANYLTRANSFERASE | BETA SUBUNIT” |
| | | | | | | | | | BETA SUBUNIT; | |
| | | | | | | | | | CHAIN: B, D;” | |
| 416 | 1ds9 | A | 65 | 173 | 4.20E−14 | −0.32 | 0 | | OUTER ARM DYNEIN; | “CONTRACTILE PROTEIN LEUCINE-RICH |
| | | | | | | | | | CHAIN: A; | REPEAT, BETA-BETA-ALPHA CYLINDER, |
| | | | | | | | | | | DYNEIN, 2 CHLAMYDOMONAS, |
| | | | | | | | | | | FLAGELLA” |
| 416 | 1ev2 | G | 288 | 376 | 3.40E−09 | 0.04 | 0.36 | | “FIBROBLAST GROWTH | “GROWTH FACTOR/GROWTH FACTOR |
| | | | | | | | | | FACTOR 2; CHAIN: A, B, C, | RECEPTOR FGF2; FGFR2; |
| | | | | | | | | | D; FIBROBLAST GROWTH | IMMUNOGLOBULIN (IG)LIKE DOMAINS |
| | | | | | | | | | FACTOR RECEPTOR 2; | BELONGING TO THE I-SET 2 SUBGROUP |
| | | | | | | | | | CHAIN: E, F, G, H;” | WITHIN IG-LIKE DOMAINS, B-TREFOIL |
| | | | | | | | | | | FOLD” |
| 416 | 1ev2 | E | 293 | 377 | 3.40E−09 | 0.06 | −0.11 | | “FIBROBLAST GROWTH | “GROWTH FACTOR/GROWTH FACTOR |
| | | | | | | | | | FACTOR 2; CHAIN: A, B, C, | RECEPTOR FGF2; FGFR2; |
| | | | | | | | | | D; FIBROBLAST GROWTH | IMMUNOGLOBULIN (IG)LIKE DOMAINS |
| | | | | | | | | | FACTOR RECEPTOR 2; | BELONGING TO THE I-SET 2 SUBGROUP |
| | | | | | | | | | CHAIN: E, F, G, H;” | WITHIN IG-LIKE DOMAINS, B-TREFOIL |
| | | | | | | | | | | FOLD” |
| 416 | 1evt | C | 293 | 404 | 3.40E−10 | 0.03 | −0.09 | | “FIBROBLAST GROWTH | “GROWTH FACTOR/GROWTH FACTOR |
| | | | | | | | | | FACTOR 1; CHAIN: A, B; | RECEPTOR FGF1; FGFR1; |
| | | | | | | | | | FIBROBLAST GROWTH | IMMUNOGLOBULIN (IG) LIKE DOMAINS |
| | | | | | | | | | FACTOR RECEPTOR 1; | BELONGING TO THE I-SET 2 SUBGROUP |
| | | | | | | | | | CHAIN: C, D;” | WITHIN IG-LIKE DOMAINS, B-TREFOIL |
| | | | | | | | | | | FOLD” |
| 416 | 1fhg | A | 291 | 372 | 3.40E−09 | 0.01 | 0.34 | | TELOKIN; CHAIN: A | “CONTRACTILE PROTEIN |
| | | | | | | | | | | IMMUNOGLOBULIN FOLD, BETA |
| | | | | | | | | | | BARREL” |
| 416 | 1fo1 | B | 155 | 224 | 8.50E−06 | −0.13 | 0.03 | | “NUCLEAR RNA EXPORT | “RNA BINDING PROTEIN TAP (NFX1); |
| | | | | | | | | | FACTOR 1; CHAIN: A, B;” | RIBONUCLEOPROTEIN (RNP, RBD OR |
| | | | | | | | | | | RRM) AND LEUCINE-RICH-REPEAT 2 |
| | | | | | | | | | | (LRR)” |
| 416 | 1fo1 | A | 155 | 224 | 8.50E−06 | −0.21 | 0.23 | | “NUCLEAR RNA EXPORT | “RNA BINDING PROTEIN TAP (NFX1); |
| | | | | | | | | | FACTOR 1; CHAIN: A, B;” | RIBONUCLEOPROTEIN (RNP, RBD OR |
| | | | | | | | | | | RRM) AND LEUCINE-RICH-REPEAT 2 |
| | | | | | | | | | | (LRR)” |
| 416 | 1fs2 | A | 63 | 215 | 3.40E−06 | −0.09 | 0.12 | | “SKP2; CHAIN: A, C; SKP1; | “LIGASE CYCLIN A/CDK2-ASSOCIATED |
| | | | | | | | | | CHAIN: B, D;” | P45; CYCLIN A/CDK2-ASSOCIATED P19; |
| | | | | | | | | | | SKP1, SKP2, F-BOX, LRRS, LEUCINE-RICH |
| | | | | | | | | | | REPEATS, SCF, 2 UBIQUITIN, E3, |
| | | | | | | | | | | UBIQUITIN PROTEIN LIGASE” |
| 416 | 1yrg | A | 61 | 231 | 0.00051 | 0.4 | 0.27 | | “GTPASE-ACTIVATING | “TRANSCRIPTION RNA1P; RANGAP; |
| | | | | | | | | | PROTEIN RNA1_SCHPO; | GTPASE-ACTIVATING PROTEIN FOR SPI1, |
| | | | | | | | | | CHAIN: A, B;” | GTPASE-ACTIVATING PROTEIN, GAP, |
| | | | | | | | | | | RNA1P, RANGAP, LRR, LEUCINE-2 RICH |
| | | | | | | | | | | REPEAT PROTEIN, TWINNING, |
| | | | | | | | | | | HEMIHEDRAL TWINNING, 3 |
| | | | | | | | | | | MEROHEDRAL TWINNING, MEROHEDRY” |
| 417 | 1cew | I | 131 | 228 | 1.30E−18 | 0.01 | 0.04 | | | PROTEINASE INHIBITOR(CYSTEINE) |
| | | | | | | | | | | CYSTATIN 1CEW 3 |
| 417 | 1cew | I | 33 | 117 | 4.20E−05 | −0.01 | 0.01 | | | PROTEINASE INHIBITOR(CYSTEINE) |
| | | | | | | | | | | CYSTATIN 1CEW 3 |
| 418 | 1cew | I | 25 | 132 | 1.20E−23 | −0.03 | 0.12 | | | PROTEINASE INHIBITOR(CYSTEINE) |
| | | | | | | | | | | CYSTATIN 1CEW 3 |
| 420 | 1buc | A | 63 | 442 | 0 | 0.9 | 1 | | | ACYL-COA DEHYDROGENASE |
| | | | | | | | | | | (FLAVOPROTEIN) BUTYRYL-COA |
| | | | | | | | | | | DEHYDROGENASE (BCAD) (BACTERIAL |
| | | | | | | | | | | SHORT-CHAIN 1BUC 3 ACYL-COA |
| | | | | | | | | | | DEHYDROGENASE) (E.C.1.3.99.2) |
| | | | | | | | | | | COMPLEXED WITH 1BUC 4 FAD AND |
| | | | | | | | | | | ACETOACETYL-COENZYME A 1BUC 5 |
| 420 | 1egd | A | 57 | 444 | 0 | 0.71 | 1 | | “MEDIUM CHAIN ACYL- | “ELECTRON TRANSFER ACYL-COA |
| | | | | | | | | | COA DEHYDROGENASE; | DEHYDROGENASE, FLAVOPROTEIN, |
| | | | | | | | | | CHAIN: A, B, C, D;” | ELECTRON TRANSFER” |
| 420 | 1ivh | A | 63 | 439 | 0 | 0.76 | 1 | | “ISOVALERYL-COA | “OXIDOREDUCTASE OXIDOREDUCTASE, |
| | | | | | | | | | DEHYDROGENASE; CHAIN: | ACYL-COA DEHYDROGENASE, |
| | | | | | | | | | A, B, C, D;” | FLAVOPROTEIN, 2 ISOVALERYL-COA, |
| | | | | | | | | | | ISOVALERIC ACIDEMIA” |
| 420 | 3mdd | A | 60 | 444 | 0 | 0.9 | 1 | | | OXIDOREDUCTASE MEDIUM CHAIN |
| | | | | | | | | | | ACYL-COA DEHYDROGENASE (MCAD) |
| | | | | | | | | | | (E.C.1.3.99.3) 3MDD 3 |
| 421 | 1a88 | A | 144 | 373 | 3.40E−30 | 0.29 | −0.17 | | “CHLOROPEROXIDASE L; | “HALOPEROXIDASE BROMOPEROXIDASE |
| | | | | | | | | | CHAIN: A, B, C;” | L, HALOPEROXIDASE L; |
| | | | | | | | | | | HALOPEROXIDASE, OXIDOREDUCTASE” |
| 421 | 1a8q | | 146 | 374 | 1.70E−27 | 0.18 | −0.06 | | BROMOPEROXIDASE A1; | “HALOPEROXIDASE |
| | | | | | | | | | CHAIN: NULL; | CHLOROPEROXIDASE A1, |
| | | | | | | | | | | HALOPEROXIDASE A1; |
| | | | | | | | | | | HALOPEROXIDASE, OXIDOREDUCTASE” |
| 421 | 1a8s | | 144 | 373 | 1.40E−30 | 0.38 | 0.1 | | CHLOROPEROXIDASE F; | “HALOPEROXIDASE HALOPEROXIDASE |
| | | | | | | | | | CHAIN: NULL; | F; HALOPEROXIDASE, |
| | | | | | | | | | | OXIDOREDUCTASE, PROPIONATE |
| | | | | | | | | | | COMPLEX” |
| 421 | 1azw | A | 135 | 333 | 5.10E−22 | 0.07 | −0.14 | | “PROLINE | “AMINOPEPTIDASE AMINOPEPTIDASE, |
| | | | | | | | | | IMINOPEPTIDASE; CHAIN: | PROLINE IMINOPEPTIDASE, SERINE |
| | | | | | | | | | A, B;” | PROTEASE, 2 XANTHOMONAS |
| | | | | | | | | | | CAMPESTRIS” |
| 421 | 1b6g | | 159 | 273 | 1.40E−13 | 0.51 | −0.07 | | HALOALKANE | “HYDROLASE HYDROLASE, |
| | | | | | | | | | DEHALOGENASE; CHAIN: | HALOALKANE DEHALOGENASE, |
| | | | | | | | | | NULL; | ALPHA/BETA-HYDROLASE” |
| 421 | 1c4x | A | 162 | 373 | 1.70E−25 | 0.17 | −0.18 | | “2-HYDROXY-6-OXO-6- | “HYDROLASE BPHD; HYDROLASE, PCB |
| | | | | | | | | | PHENYLHEXA-2,4- | DEGRADATION” |
| | | | | | | | | | DIENOATE CHAIN: A;” | |
| 421 | 1cqw | A | 150 | 303 | 8.50E−22 | 0.11 | −0.15 | | HALOALKANE | “HYDROLASE A/B HYDROLASE FOLD, |
| | | | | | | | | | DEHALOGENASE; 1- | DEHALOGENASE I-S BOND” |
| | | | | | | | | | CHLOROHEXANE CHAIN: A; | |
| 421 | 1ehy | A | 135 | 267 | 1.70E−18 | 0.22 | −0.05 | | “SOLUBLE EPOXIDE | “HYDROLASE HYDROLASE, ALPHA/BETA |
| | | | | | | | | | HYDROLASE; CHAIN: A, B, | HYDROLASE FOLD, EPOXIDE |
| | | | | | | | | | C, D;” | DEGRADATION, 2 EPICHLOROHYDRIN” |
| 421 | 1ehy | A | 170 | 303 | 4.20E−06 | −0.12 | 0.12 | | “SOLUBLE EPOXIDE | “HYDROLASE HYDROLASE, ALPHA/BETA |
| | | | | | | | | | HYDROLASE; CHAIN: A, B, | HYDROLASE FOLD, EPOXIDE |
| | | | | | | | | | C, D;” | DEGRADATION, 2 EPICHLOROHYDRIN” |
| 421 | 1evq | A | 130 | 286 | 1.00E−11 | 0.06 | −0.15 | | SERINE HYDROLASE; | HYDROLASE ALPHA/BETA HYDROLASE |
| | | | | | | | | | CHAIN: A; | FOLD |
| 421 | 1hlg | A | 137 | 272 | 3.40E−09 | 0.31 | −0.17 | | “LIPASE, GASTRIC; CHAIN: | HYDROLASE LIPASE |
| | | | | | | | | | A, B;” | |
| 421 | 1jkm | A | 134 | 273 | 1.50E−12 | 0.49 | 0.07 | | “BREFELDIN A ESTERASE; | “SERINE HYDROLASE SERINE |
| | | | | | | | | | CHAIN: A, B;” | HYDROLASE, DEGRADATION OF |
| | | | | | | | | | | BREFELDIN A, ALPHA/BETA 2 |
| | | | | | | | | | | HYDROLASE FAMILY” |
| 421 | 1qfm | A | 3 | 377 | 1.70E−42 | 0.07 | −0.07 | | PROLYL OLIGOPEPTIDASE; | “HYDROLASE PROLYL ENDOPEPTIDASE, |
| | | | | | | | | | CHAIN: A; | POST-PROLINE CLEAVING PROLYL |
| | | | | | | | | | | OLIGOPEPTIDASE, AMNESIA, |
| | | | | | | | | | | ALPHA/BETA-HYDROLASE, BETA- 2 |
| | | | | | | | | | | PROPELLER” |
| 421 | 1qtr | A | 132 | 333 | 6.80E−22 | 0.07 | −0.07 | | PROLYL AMINOPEPTIIDASE; | “HYDROLASE ALPHA BETA HYDROLASE |
| | | | | | | | | | | HALOPEROXIDASE, OXIDOREDUCTASE” |
| 421 | 1a8q | | 146 | 374 | 1.70E−27 | 0.18 | −0.06 | | BROMOPEROXIDASE A1; | “HALOPEROXIDASE |
| | | | | | | | | | CHAIN: NULL; | CHLOROPEROXIDASE A1, |
| | | | | | | | | | | HALOPEROXIDASE A1; |
| | | | | | | | | | | HALOPEROXIDASE, OXIDOREDUCTASE” |
| 421 | 1a8s | | 144 | 373 | 1.40E−30 | 0.38 | 0.1 | | CHLOROPEROXIDASE F; | “HALOPEROXIDASE HALOPEROXIDASE |
| | | | | | | | | | CHAIN: NULL; | F; HALOPEROXIDASE, |
| | | | | | | | | | | OXIDOREDUCTASE, PROPIONATE |
| | | | | | | | | | | COMPLEX” |
| 421 | 1azw | A | 135 | 333 | 5.10E−22 | 0.07 | −0.14 | | “PROLINE | “AMINOPEPTIDASE AMINOPEPTIDASE, |
| | | | | | | | | | IMINOPEPTIDASE; CHAIN: | PROLINE IMINOPEPTIDASE, SERINE |
| | | | | | | | | | A, B;” | PROTEASE, 2 XANTHOMONAS |
| | | | | | | | | | | CAMPESTRIS” |
| 421 | 1b6g | | 159 | 273 | 1.40E−13 | 0.51 | −0.07 | | HALOALKANE | “HYDROLASE HYDROLASE, |
| | | | | | | | | | DEHALOGENASE; CHAIN: | HALOALKANE DEHALOGENASE, |
| | | | | | | | | | NULL; | ALPHA/BETA-HYDROLASE” |
| 421 | 1c4x | A | 162 | 373 | 1.70E−25 | 0.17 | −0.18 | | “2-HYDROXY-6-OXO-6- | “HYDROLASE BPHD; HYDROLASE, PCB |
| | | | | | | | | | PHENYLHEXA-2,4- | DEGRADATION” |
| | | | | | | | | | DIENOATE CHAIN: A;” | |
| 421 | 1cqw | A | 150 | 303 | 8.50E−22 | 0.11 | −0.15 | | HALOALKANE | “HYDROLASE A/B HYDROLASE FOLD, |
| | | | | | | | | | DEHALOGENASE; 1- | DEHALOGENASE I-S BOND” |
| | | | | | | | | | CHLOROHEXANE CHAIN: A; | |
| 421 | 1ehy | A | 135 | 267 | 1.70E−18 | 0.22 | −0.05 | | “SOLUBLE EPOXIDE | “HYDROLASE HYDROLASE, ALPHA/BETA |
| | | | | | | | | | HYDROLASE; CHAIN: A, B, | HYDROLASE FOLD, EPOXIDE |
| | | | | | | | | | C, D;” | DEGRADATION, 2 EPICHLOROHYDRIN” |
| 421 | 1ehy | A | 170 | 303 | 4.20E−06 | −0.12 | 0.12 | | “SOLUBLE EPOXIDE | “HYDROLASE HYDROLASE, ALPHA/BETA |
| | | | | | | | | | HYDROLASE; CHAIN: A, B, | HYDROLASE FOLD, EPOXIDE |
| | | | | | | | | | C, D;” | DEGRADATION, 2 EPICHLOROHYDRIN” |
| 421 | 1evq | A | 130 | 286 | 1.00E−11 | 0.06 | −0.15 | | SERINE HYDROLASE; | HYDROLASE ALPHA/BETA HYDROLASE |
| | | | | | | | | | CHAIN: A; | FOLD |
| 421 | 1hlg | A | 137 | 272 | 3.40E−09 | 0.31 | −0.17 | | “LIPASE, GASTRIC; CHAIN: | HYDROLASE LIPASE |
| | | | | | | | | | A, B;” | |
| 421 | 1jkm | A | 134 | 273 | 1.50E−12 | 0.49 | 0.07 | | “BREFELDIN A ESTERASE; | “SERINE HYDROLASE SERINE |
| | | | | | | | | | CHAIN: A, B;” | HYDROLASE, DEGRADATION OF |
| | | | | | | | | | | BREFELDIN A, ALPHA/BETA 2 |
| | | | | | | | | | | HYDROLASE FAMILY” |
| 421 | 1qfm | A | 3 | 377 | 1.70E−42 | 0.07 | −0.07 | | PROLYL OLIGOPEPTIDASE; | “HYDROLASE PROLYL ENDOPEPTIDASE, |
| | | | | | | | | | CHAIN: A; | POST-PROLINE CLEAVING PROLYL |
| | | | | | | | | | | OLIGOPEPTIDASE, AMNESIA, |
| | | | | | | | | | | ALPHA/BETA-HYDROLASE, BETA- 2 |
| | | | | | | | | | | PROPELLER” |
| 421 | 1qtr | A | 132 | 333 | 6.80E−22 | 0.07 | −0.07 | | PROLYL AMINOPEPTIDASE; | “HYDROLASE ALPHA BETA HYDROLASE |
| | | | | | | | | | CHAIN: A; | FOLD, PROLINE, PROLYL |
| | | | | | | | | | | AMINOPEPTIDASE, 2 SERRATIA, |
| | | | | | | | | | | IMINOPEPTIDASE” |
| 422 | 1deq | C | 98 | 362 | 5.10E−74 | 0.35 | 0.75 | | “FIBRINOGEN (ALPHA | BLOOD CLOTTING COILED-COIL |
| | | | | | | | | | CHAIN); CHAIN: A, D, N, Q; | |
| | | | | | | | | | FIBRINOGEN (BETA | |
| | | | | | | | | | CHAIN); CHAIN: B, E, O, R; | |
| | | | | | | | | | FIBRINOGEN (GAMMA | |
| | | | | | | | | | CHAIN); CHAIN: C, F, P, S; | |
| | | | | | | | | | FIBRINOGEN; CHAIN: M, Z;” | |
| 422 | 1ei3 | C | 98 | 361 | 6.80E−74 | 0.21 | 0.82 | | “FIBRINOGEN; CHAIN: A, D; | “BLOOD CLOTTING COILED COILS, |
| | | | | | | | | | FIBRINOGEN; CHAIN: B, E; | DISULFIDE RINGS, FIBRIN FORMING |
| | | | | | | | | | FIBRINOGEN; CHAIN: C, F;” | ENTITIES” |
| 422 | 1ei3 | B | 39 | 361 | 2.10E−73 | −0.04 | 0.19 | | “FIBRINOGEN; CHAIN: A, D; | “BLOOD CLOTTING COILED COILS, |
| | | | | | | | | | FIBRINOGEN; CHAIN: B, E; | DISULFIDE RINGS, FIBRIN FORMING |
| | | | | | | | | | FIBRINOGEN; CHAIN: C, F;” | ENTITIES” |
| 422 | 1ei3 | B | 113 | 363 | 5.10E−69 | 0.33 | 0.95 | | “FIBRINOGEN; CHAIN: A, D; | “BLOOD CLOTTING COILED COILS, |
| | | | | | | | | | FIBRINOGEN; CHAIN: B, E; | DISULFIDE RINGS, FIBRIN FORMING |
| | | | | | | | | | FIBRINOGEN; CHAIN: C, F;” | ENTITIES” |
| 422 | 1fib | | 139 | 361 | 8.50E−72 | 0.61 | 1 | | GAMMA-FIBRINOGEN | “BLOOD COAGULATION FACTOR BLOOD |
| | | | | | | | | | CARBOXYL TERMINAL | COAGULATION, GLYCOPROTEIN, |
| | | | | | | | | | FRAGMENT; CHAIN: NULL; | CALCIUM, PLATELET, PLASMA, 2 |
| | | | | | | | | | | ALTERNATIVE SPLICING, SIGNAL, |
| | | | | | | | | | | DISEASE MUTATION, 3 POLYMORPHISM” |
| 422 | 1fib | | 143 | 364 | 8.50E−72 | | | 127.21 | GAMMA-FIBRINOGEN | “BLOOD COAGULATION FACTOR BLOOD |
| | | | | | | | | | CARBOXYL TERMINAL | COAGULATION, GLYCOPROTEIN, |
| | | | | | | | | | FRAGMENT; CHAIN: NULL; | CALCIUM, PLATELET, PLASMA, 2 |
| | | | | | | | | | | ALTERNATIVE SPLICING, SIGNAL, |
| | | | | | | | | | | DISEASE MUTATION, 3 POLYMORPHISM” |
| 422 | 1fzc | C | 98 | 361 | 5.10E−76 | 0.22 | 1 | | “FIBRIN; CHAIN: A, B, C, D, | “BLOOD COAGULATION BLOOD |
| | | | | | | | | | E, F, G, H, I, J;” | COAGULATION, PLASMA PROTEIN, |
| | | | | | | | | | | CROSSLINKING” |
| 422 | 1fzc | B | 99 | 363 | 5.10E−70 | 0.39 | 1 | | “FIBRIN; CHAIN: A, B, C, D, | “BLOOD COAGULATION BLOOD |
| | | | | | | | | | E, F, G, H, I, J;” | COAGULATION, PLASMA PROTEIN, |
| | | | | | | | | | | CROSSLINKING” |
| 422 | 1fzc | C | 92 | 368 | 5.10E−76 | | | 143.39 | “FIBRIN; CHAIN: A, B, C, D, | “BLOOD COAGULATION BLOOD |
| | | | | | | | | | E, F, G, H, I, J;” | COAGULATION, PLASMA PROTEIN, |
| | | | | | | | | | | CROSSLINKING” |
| 422 | 1fzc | B | 95 | 362 | 5.10E−70 | | | 141.03 | “FIBRIN; CHAIN: A, B, C, D, | “BLOOD COAGULATION BLOOD |
| | | | | | | | | | E, F, G, H, I, J;” | COAGULATION, PLASMA PROTEIN, |
| | | | | | | | | | | CROSSLINKING” |
| 422 | 1fzd | A | 184 | 365 | 3.40E−70 | 0.99 | 1 | | “FIBRINOGEN-420; CHAIN: | “BLOOD COAGULATION BLOOD |
| | | | | | | | | | A, B, C, D, E, F, G, H;” | COAGULATION, FIBRINOGEN-420, |
| | | | | | | | | | | ALPHAEC DOMAIN, 2 FIBRINOGEN |
| | | | | | | | | | | RELATED DOMAIN, GLYCOSYLATED |
| | | | | | | | | | | PROTEIN” |
| 422 | 1fzd | A | 184 | 365 | 3.40E−70 | | | 145.75 | “FIBRINOGEN-420; CHAIN: | “BLOOD COAGULATION BLOOD |
| | | | | | | | | | A, B, C, D, E, F, G, H;” | COAGULATION, FIBRINOGEN-420, |
| | | | | | | | | | | ALPHAEC DOMAIN, 2 FIBRINOGEN |
| | | | | | | | | | | RELATED DOMAIN, GLYCOSYLATED |
| | | | | | | | | | | PROTEIN” |
| 422 | 1fzg | C | 98 | 361 | 5.10E−76 | 0.16 | 1 | | “FIBRINOGEN; CHAIN: A, B, | “BLOOD COAGULATION BLOOD |
| | | | | | | | | | C, D, E, F, S, T, M, N;” | COAGULATION, PLASMA, PLATELET, |
| | | | | | | | | | | FIBRINOGEN, FIBRIN” |
| 422 | 1fzg | E | 117 | 364 | 5.10E−70 | 0.37 | 1 | | “FIBRINOGEN; CHAIN: A, B, | “BLOOD COAGULATION BLOOD |
| | | | | | | | | | C, D, E, F, S, T, M, N;” | COAGULATION, PLASMA, PLATELET, |
| | | | | | | | | | | FIBRINOGEN, FIBRIN” |
| 422 | 1fzg | C | 97 | 364 | 5.10E−76 | | | 143.75 | “FIBRINOGEN; CHAIN: A, B, | “BLOOD COAGULATION BLOOD |
| | | | | | | | | | C, D, E, F, S, T, M, N;” | COAGULATION, PLASMA, PLATELET, |
| | | | | | | | | | | FIBRINOGEN, FIBRIN” |
| 422 | 1fzg | E | 102 | 362 | 5.10E−70 | | | 136.26 | “FIBRINOGEN; CHAIN: A, B, | “BLOOD COAGULATION BLOOD |
| | | | | | | | | | C, D, E, F, S, T, M, N;” | COAGULATION, PLASMA, PLATELET, |
| | | | | | | | | | | FIBRINOGEN, FIBRIN” |
| 423 | 1aln | A | 26 | 249 | 0 | 0.43 | 1 | | “B*3501; CHAIN: A, B; | “COMPLEX (ANTIGEN/PEPTIDE) B35; |
| | | | | | | | | | PEPTIDE VPLRPMTY; | MAJOR HISTOCOMPATIBILITY ANTIGEN, |
| | | | | | | | | | CHAIN: C;” | MHC, HLA, HLA-B3501, HIV, 2NEF, |
| | | | | | | | | | | COMPLEX (ANTIGEN/PEPTIDE)” |
| 423 | 1aln | A | 26 | 249 | 0 | | | 152.97 | “B*3501; CHAIN: A, B; | “COMPLEX (ANTIGEN/PEPTIDE) B35; |
| | | | | | | | | | PEPTIDE VPLRPMTY; | MAJOR HISTOCOMPATIBILITY ANTIGEN, |
| | | | | | | | | | CHAIN: C;” | MHC, HLA, HLA-B3501, HIV, 2NEF, |
| | | | | | | | | | | COMPLEX (ANTIGEN/PEPTIDE)” |
| 423 | 1agd | A | 26 | 249 | 0 | 0.35 | 1 | | B*0801; CHAIN: A; BETA-2 | “HISTOCOMPATIBILITY COMPLEX B8; |
| | | | | | | | | | MICROGLOBULIN; CHAIN: | B2M; PEPTIDE HLA B8, HIV, MHC CLASS I, |
| | | | | | | | | | B; HIV-1 GAG PEPTIDE | HISTOCOMPATIBILITY COMPLEX” |
| | | | | | | | | | (GGKKKYKL-INDEX | |
| | | | | | | | | | PEPTIDE); CHAIN: C; | |
| 423 | 1agd | A | 26 | 249 | 0 | | | 149.07 | B*0801; CHAIN: A; BETA-2 | “HISTOCOMPATIBILITY COMPLEX B8; |
| | | | | | | | | | MICROGLOBULIN; CHAIN: | B2M; PEPTIDE HLA B8, HIV, MHC CLASS I, |
| | | | | | | | | | B; HIV-1 GAG PEPTIDE | HISTOCOMPATIBILITY COMPLEX” |
| | | | | | | | | | (GGKKKYKL-INDEX | |
| | | | | | | | | | PEPTIDE); CHAIN: C; | |
| 423 | 1duz | A | 26 | 248 | 0 | 0.37 | 1 | | “HLA-A*0201; CHAIN: A, D; | IMMUNE SYSTEM IMMUNOGLOBULIN |
| | | | | | | | | | BETA-2 MICROGLOBULIN; | FOLD |
| | | | | | | | | | CHAIN: B, E; HTLV-1 | |
| | | | | | | | | | OCTAMERIC TAX PEPTIDE; | |
| | | | | | | | | | CHAIN: C, F;” | |
| 423 | 1efx | A | 26 | 250 | 0 | 0.56 | 1 | | “HLA-CW3 (HEAVY CHAIN); | “IMMUNE SYSTEM MHC, HLA, CLASS I, |
| | | | | | | | | | CHAIN: A; BETA-2- | KIR, NK CELL RECEPTOR, |
| | | | | | | | | | MICROGLOBULIN; CHAIN: | IMMUNOGLOBULIN 2 FOLD, |
| | | | | | | | | | B; PEPTIDE FROM | RECEPTOR/MHC COMPLEX” |
| | | | | | | | | | IMPORTIN ALPHA-2; | |
| | | | | | | | | | CHAIN: C; NATURAL | |
| | | | | | | | | | KILLER CELL RECEPTOR | |
| | | | | | | | | | KIR2DL2; CHAIN: D, E;” | |
| 423 | 1hoc | A | 26 | 245 | 1.40E−96 | | | 132.01 | | “HISTOCOMPATIBILITY ANTIGEN |
| | | | | | | | | | | MURINE CLASS I MAJOR |
| | | | | | | | | | | HISTOCOMPATIBILITY COMPLEX |
| | | | | | | | | | | CONSISTING 1HOC 3 OF H-2D═B═, B2- |
| | | | | | | | | | | MICROGLOBULIN, AND A 9-RESIDUE |
| | | | | | | | | | | PEPTIDE 1HOC 4” |
| 423 | 1hsa | A | 26 | 249 | 0 | 0.4 | 1 | | | HISTOCOMPATIBILITY ANTIGEN HUMAN |
| | | | | | | | | | | CLASS I HISTOCOMPATIBILITY ANTIGEN |
| | | | | | | | | | | 1HSA 3/HLA-B(ASTERISK)2705$ 1HSA 4 |
| 423 | 1hsa | A | 26 | 249 | 0 | | | 148.54 | | HISTOCOMPATIBILITY ANTIGEN HUMAN |
| | | | | | | | | | | CLASS I HISTOCOMPATIBILITY ANTIGEN |
| | | | | | | | | | | 1HSA 3 /HLA-B(ASTERISK)2705$ 1HSA 4 |
| 423 | 1hsb | A | 26 | 243 | 0 | 0.44 | 1 | | | HISTOCOMPATIBILITY ANTIGEN CLASS I |
| | | | | | | | | | | HISTOCOMPATIBILITY ANTIGEN AW68.1 |
| | | | | | | | | | | (LEUCOCYTE 1HSB 3 ANTIGEN) 1HSB 4 |
| 423 | 1hsb | A | 26 | 243 | 0 | | | 136.73 | | HISTOCOMPATIBILITY ANTIGEN CLASS I |
| | | | | | | | | | | HISTOCOMPATIBILITY ANTIGEN AW68.1 |
| | | | | | | | | | | (LEUCOCYTE 1HSB 3 ANTIGEN) 1HSB 4 |
| 423 | 1ld9 | A | 26 | 241 | 3.40E−96 | | | 121.61 | MHC CLASS IH-2LD HEAVY | “MAJOR HISTOCOMPATIBILITY |
| | | | | | | | | | CHAIN; CHAIN: A; BETA-2 | COMPLEX LD; MAJOR |
| | | | | | | | | | MICROGLOBULIN; CHAIN: | HISTOCOMPATIBILITY COMPLEX, LD” |
| | | | | | | | | | B; NANO-PEPTIDE; CHAIN: | |
| | | | | | | | | | C; | |
| 423 | 1mhc | A | 26 | 249 | 1.00E−90 | | | 130.39 | “MHC CLASS I ANTIGEN H2- | HISTOCOMPATIBILITY |
| | | | | | | | | | M3; 1MHC 6 CHAIN: A, B, D, | ANTIGEN/PEPTIDE MAJOR |
| | | | | | | | | | E; 1MHC 7 NONAPEPTIDE | HISTOCOMPATIBILITY COMPLEX; 1MHC |
| | | | | | | | | | FROM RAT NADH | 8 ND1; 1MHC 15 |
| | | | | | | | | | DEHYDROGENASE; 1MHC | |
| | | | | | | | | | 12 CHAIN: C, F; 1MHC 13” | |
| 423 | 1mhe | A | 27 | 247 | 0 | 0.36 | 1 | | “HLA CLASS I | “MAJOR HISTOCOMPATIBILITY |
| | | | | | | | | | HISTOCOMPATIBILITY | COMPLEX MHC NONCLASSICAL CHAIN, |
| | | | | | | | | | ANTIGEN HLA-E; CHAIN: A, | MHC-E, HLA-E, MHC CLASS HLA-E, HLA |
| | | | | | | | | | C; BETA-2- | E, MAJOR HISTOCOMPATIBILITY |
| | | | | | | | | | MICROGLOBULIN; CHAIN: | COMPLEX, MHC, HLA, 2 BETA 2 |
| | | | | | | | | | B, D; PEPTIDE | MICROGLOBULIN, PEPTIDE, LEADER |
| | | | | | | | | | (VMAPRTVLL); CHAIN: P, | PEPTIDE, 3 NON-CLASSICAL MHC, CLASS |
| | | | | | | | | | Q;” | IB MHC” |
| 423 | 1mhe | A | 27 | 247 | 0 | | | 137.71 | “HLA CLASS I | “MAJOR HISTOCOMPATIBILITY |
| | | | | | | | | | HISTOCOMPATIBILITY | COMPLEX MHC NONCLASSICAL CHAIN, |
| | | | | | | | | | ANTIGEN HLA-E; CHAIN: A, | MHC-E, HLA-E, MHC CLASS HLA-E, HLA |
| | | | | | | | | | C; BETA-2- | E, MAJOR HISTOCOMPATIBILITY |
| | | | | | | | | | MICROGLOBULIN; CHAIN: | COMPLEX, MHC, HLA, 2 BETA 2 |
| | | | | | | | | | B, D; PEPTIDE | MICROGLOBULIN, PEPTIDE, LEADER |
| | | | | | | | | | (VMAPRTVLL); CHAIN: P, | PEPTIDE, 3 NON-CLASSICAL MHC, CLASS |
| | | | | | | | | | Q;” | IB MHC” |
| 423 | 1osz | A | 26 | 247 | 8.50E−99 | 0.48 | 1 | | MHC CLASS I H-2KB HEAVY | “COMPLEX (MHC I/PEPTIDE) VSV-8; |
| | | | | | | | | | CHAIN; CHAIN: A; BETA-2 | MHC/PEPTIDE COMPLEX, |
| | | | | | | | | | MICROGLOBULIN; CHAIN: | TRANSMEMBRANE PROTEIN, THYMIC 2 |
| | | | | | | | | | B; VESICULAR STOMATITIS | SELECTION, COMPLEX (MHC I/PEPTIDE)” |
| | | | | | | | | | VIRUS NUCLEOPROTEIN; | |
| | | | | | | | | | CHAIN: C; | |
| 423 | 1osz | A | 26 | 247 | 8.50E−99 | | | 138.77 | MHC CLASS I H-2KB HEAVY | “COMPLEX (MHC I/PEPTIDE) VSV-8; |
| | | | | | | | | | CHAIN; CHAIN: A; BETA-2 | MHC/PEPTIDE COMPLEX, |
| | | | | | | | | | MICROGLOBULIN; CHAIN: | TRANSMEMBRANE PROTEIN, THYMIC 2 |
| | | | | | | | | | B; VESICULAR STOMATITIS | SELECTION, COMPLEX (MHC I/PEPTIDE)” |
| | | | | | | | | | VIRUS NUCLEOPROTEIN; | |
| | | | | | | | | | CHAIN: C; | |
| 423 | 1qo3 | A | 27 | 247 | 0 | 0.44 | 1 | | “MHC CLASS I H-2DD | “COMPLEX (NK RECEPTOR/MHC CLASS I) |
| | | | | | | | | | HEAVY CHAIN; CHAIN: A; | H-2 CLASS I HISTOCOMPATIBILITY |
| | | | | | | | | | BETA-2-MICROGLOBULIN; | ANTIGEN, B2M; NK-CELL SURFACE |
| | | | | | | | | | CHAIN: B; HIV ENVELOPE | GLYCOPROTEIN YE1/48, NK CELL, |
| | | | | | | | | | GLYCOPROTEIN 120 | INHIBITORY RECEPTOR, MHC-I, C-TYPE |
| | | | | | | | | | PEPTIDE; CHAIN: P; LY49A; | LECTIN-LIKE, 2 HISTOCOMPATIBILITY, |
| | | | | | | | | | CHAIN: C, D;” | B2M, LY49, LY-49” |
| 423 | 1qqd | A | 27 | 247 | 0 | 0.36 | 1 | | HISTOCOMPATIBILITY | “IMMUNE SYSTEM IMMUNOGLOBULIN |
| | | | | | | | | | LEUKOCYTE ANTIGEN | (IG)-LIKE DOMAIN, ALPHA HELIX, BETA |
| | | | | | | | | | (HLA)-CW4 CHAIN: A; | SHEET, 2 IMMUNE SYSTEM” |
| | | | | | | | | | BETA-2 MICROGLOBULIN; | |
| | | | | | | | | | CHAIN: B; HLA-CW4 | |
| | | | | | | | | | SPECIFIC PEPTIDE; CHAIN: | |
| | | | | | | | | | C; | |
| 423 | 1zag | A | 25 | 249 | 1.50E−71 | | | 344.18 | “ZINC-ALPHA-2- | “LIPID MOBILIZATION FACTOR ZN- |
| | | | | | | | | | GLYCOPROTEIN; CHAIN: A, | ALPHA-2-GLYCOPROTEIN, ZAG LIPID |
| | | | | | | | | | B, C, D;” | MOBILIZATION FACTOR, SECRETED MHC |
| | | | | | | | | | | CLASS I HOMOLOG” |
| 425 | 1by2 | | 304 | 411 | 5.10E−44 | 1.06 | 1 | | MAC-2 BINDING PROTEIN; | “EXTRACELLULAR MODULE TUMOR- |
| | | | | | | | | | CHAIN: NULL; | ASSOCIATED ANTIGEN 90K; |
| | | | | | | | | | | EXTRACELLULAR MODULE, |
| | | | | | | | | | | SCAVENGER RECEPTOR, TUMOR- |
| | | | | | | | | | | ASSOCIATED 2 ANTIGEN, |
| | | | | | | | | | | EXTRACELLULAR MATRIX, |
| | | | | | | | | | | GLYCOSYLATED PROTEIN” |
| 425 | 1by2 | | 39 | 149 | 1.20E−42 | 1.45 | 1 | | MAC-2 BINDING PROTEIN; | “EXTRACELLULAR MODULE TUMOR- |
| | | | | | | | | | CHAIN; NULL; | ASSOCIATED ANTIGEN 90K, |
| | | | | | | | | | | EXTRACELLULAR MODULE, |
| | | | | | | | | | | SCAVENGER RECEPTOR, TUMOR- |
| | | | | | | | | | | ASSOCIATED 2 ANTIGEN, |
| | | | | | | | | | | EXTRACELLULAR MATRIX, |
| | | | | | | | | | | GLYCOSYLATED PROTEIN” |
| 425 | 1by2 | | 165 | 281 | 1.70E−38 | 0.48 | 0.72 | | MAC-2 BINDING PROTEIN; | “EXTRACELLULAR MODULE TUMOR- |
| | | | | | | | | | CHAIN: NULL; | ASSOCIATED ANTIGEN 90K; |
| | | | | | | | | | | EXTRACELLULAR MODULE, |
| | | | | | | | | | | SCAVENGER RECEPTOR, TUMOR- |
| | | | | | | | | | | ASSOCIATED 2 ANTIGEN, |
| | | | | | | | | | | EXTRACELLULAR MATRIX, |
| | | | | | | | | | | GLYCOSYLATED PROTEIN” |
| 425 | 1by2 | | 37 | 150 | 1.20E−42 | | | 106.68 | MAC-2 BINDING PROTEIN; | “EXTRACELLULAR MODULE TUMOR- |
| | | | | | | | | | CHAIN: NULL; | ASSOCIATED ANTIGEN 90K; |
| | | | | | | | | | | EXTRACELLULAR MODULE, |
| | | | | | | | | | | SCAVENGER RECEPTOR, TUMOR- |
| | | | | | | | | | | ASSOCIATED 2 ANTIGEN, |
| | | | | | | | | | | EXTRACELLULAR MATRIX, |
| | | | | | | | | | | GLYCOSYLATED PROTEIN” |
| 426 | 1ail | L | 32 | 213 | 3.20E−13 | 0.07 | 0.05 | | “FAB59.1; CHAIN: L, H; | “COMPLEX (ANTIBODY/PEPTIDE) |
| | | | | | | | | | AIB142; CHAIN: P;” | COMPLEX (ANTIBODY/PEPTIDE), |
| | | | | | | | | | | ANTIBODY, CONSTRAINED HIV-1 V3 2 |
| | | | | | | | | | | LOOP PEPTIDE, IMMUNOGLOBULIN” |
| 426 | 1ail | H | 31 | 249 | 1.60E−08 | | | 50.16 | “FAB59.1; CHAIN: L, H; | “COMPLEX (ANTIBODY/PEPTIDE) |
| | | | | | | | | | AIB142; CHAIN: P;” | COMPLEX (ANTIBODY/PEPTIDE), |
| | | | | | | | | | | ANTIBODY, CONSTRAINED HIV-1 V3 2 |
| | | | | | | | | | | LOOP PEPTIDE, IMMUNOGLOBULIN” |
| 426 | 1aif | L | 35 | 213 | 6.40E−13 | 0.07 | 0.05 | | “ANTI-IDIOTYPIC FAB | “IMMUNOGLOBULIN |
| | | | | | | | | | 409.5.3 (IGG2A) FAB; CHAIN: | IMMUNOGLOBULIN, C REGION, V |
| | | | | | | | | | A, B, L, H” | REGION” |
| 426 | 1dn2 | A | 29 | 222 | 4.80E−42 | −0.11 | 0.01 | | “IMMUNOGLOBULIN | IMMUNE SYSTEM FC IGG PHAGE |
| | | | | | | | | | LAMBDA HEAVY CHAIN; | DISPLAY PEPTIDE |
| | | | | | | | | | CHAIN: A, B; ENGINEERED | |
| | | | | | | | | | PEPTIDE; CHAIN: E, F;” | |
| 426 | 1ejo | L | 32 | 213 | 3.20E−13 | −0.05 | 0.33 | | IGG2A MONOCLONAL | “IMMUNE SYSTEM FMDV, ANTIGENIC- |
| | | | | | | | | | ANTIBODY (LIGHT CHAIN); | ANTIBODY INTERACTIONS, RGD MOTIF, |
| | | | | | | | | | CHAIN: L; IGG2A | G-H LOOP 2 OF VP1.” |
| | | | | | | | | | MONOCLONAL ANTIBODY | |
| | | | | | | | | | (HEAVY CHAIN); CHAIN: H; | |
| | | | | | | | | | FMDV PEPTIDE; CHAIN: P; | |
| 426 | 1epf | A | 37 | 209 | 4.80E−21 | 0.16 | −0.07 | | “NEURAL CELL ADHESION | “CELL ADHESION NCAM; NCAM, |
| | | | | | | | | | MOLECULE; CHAIN: A, B, C, | IMMUNOGLOBULIN FOLD, |
| | | | | | | | | | D;” | GLYCOPROTEIN” |
| 426 | 1fl1 | A | 32 | 213 | 6.40E−13 | 0.06 | −0.02 | | “F124 IMMUNOGLOBULIN | “IMMUNE SYSTEM IMMUNOGLOBULIN, |
| | | | | | | | | | (KAPPA LIGHT CHAIN); | ANTIBODY, FAB, HEPATITIS B, PRES2” |
| | | | | | | | | | CHAIN: A, C; F124 | |
| | | | | | | | | | IMMUNOGLOBULIN (IGG1 | |
| | | | | | | | | | HEAVY CHAIN); CHAIN: B, | |
| | | | | | | | | | D;” | |
| 426 | 1f58 | L | 32 | 213 | 1.10E−12 | −0.04 | 0.01 | | IGG1 ANTIBODY 58.2 | “IMMUNE SYSTEM FAB 58.2; FAB 58.2; V3 |
| | | | | | | | | | (LIGHT CHAIN); CHAIN: L; | LOOP; IMMUNOGLOBULIN, FAB, HIV-1, |
| | | | | | | | | | IGG1 ANTIBODY 58.2 | GP120, V3, IMMUNE SYSTEM” |
| | | | | | | | | | (HEAVY CHAIN); CHAIN: H; | |
| | | | | | | | | | EXTERIOR MEMBRANE | |
| | | | | | | | | | GLYCOPROTEIN(GP120); | |
| | | | | | | | | | CHAIN: P; | |
| 426 | 1f58 | H | 31 | 251 | 4.80E−08 | | | 51.35 | IGG1 ANTIBODY 58.2 | “IMMUNE SYSTEM FAB 58.2; FAB 58.2; V3 |
| | | | | | | | | | (LIGHT CHAIN); CHAIN: L; | LOOP; IMMUNOGLOBULIN, FAB, HIV-1, |
| | | | | | | | | | IGG1 ANTIBODY 58.2 | GP120, V3, IMMUNE SYSTEM” |
| | | | | | | | | | (HEAVY CHAIN); CHAIN: H; | |
| | | | | | | | | | EXTERIOR MEMBRANE | |
| | | | | | | | | | GLYCOPROTEIN(GP120); | |
| | | | | | | | | | CHAIN: P; | |
| 426 | 1fc2 | D | 29 | 222 | 3.20E−41 | −0.12 | 0.19 | | | IMMUNOGLOBULIN IMMUNOGLOBULIN |
| | | | | | | | | | | FC AND FRAGMENT B OF PROTEIN A |
| | | | | | | | | | | COMPLEX 1FC2 4 |
| 426 | 1fhg | A | 28 | 125 | 4.80E−15 | 0.38 | 0.04 | | TELOKIN; CHAIN: A | “CONTRACTILE PROTEIN |
| | | | | | | | | | | IMMUNOGLOBULIN FOLD, BETA |
| | | | | | | | | | | BARREL” |
| 426 | 1igt | B | 29 | 220 | 1.60E−33 | 0.07 | −0.07 | | “IGG2A INTACT ANTIBODY- | “IMMUNOGLOBULIN INTACT |
| | | | | | | | | | MAB231; CHAIN: A, B, C, | IMMUNOGLOBULIN V REGION C |
| | | | | | | | | | D” | REGION, IMMUNOGLOBULIN” |
| 426 | 1lil | A | 25 | 228 | 6.40E−15 | | | 52.92 | “LAMBDA III BENCE JONES | “IMMUNOGLOBULIN |
| | | | | | | | | | PROTEIN CLE; CHAIN: A, B” | IMMUNOGLOBULIN, BENCE JONES |
| | | | | | | | | | | PROTEIN” |
| 426 | 1mco | H | 29 | 222 | 3.20E−41 | −0.11 | 0.06 | | | IMMUNOGLOBULIN IMMUNOGLOBULIN |
| | | | | | | | | | | G1 (IGG1) (MCG) WITH A HINGE |
| | | | | | | | | | | DELETION 1MCO 3 |
| 426 | 1nct | | 33 | 124 | 6.40E−13 | 0.2 | −0.15 | | TITIN; CHAIN: NULL; | “MUSCLE PROTEIN CONNECTIN, |
| | | | | | | | | | | NEXTM5; CELL ADHESION, |
| | | | | | | | | | | GLYCOPROTEIN, TRANSMEMBRANE, |
| | | | | | | | | | | REPEAT, BRAIN, 2 IMMUNOGLOBULIN |
| | | | | | | | | | | FOLD, ALTERNATIVE SPLICING, SIGNAL, |
| | | | | | | | | | | 3 MUSCLE PROTEIN” |
| 426 | 1tnm | | 33 | 124 | 6.40E−13 | 0.26 | −0.13 | | | “MUSCLE PROTEIN TITIN MODULE M5 |
| | | | | | | | | | | (CONNECTIN) 1TNM 3 (NMR, MINIMIZED |
| | | | | | | | | | | AVERAGE STRUCTURE) 1TNM 4 1TNM 58” |
| 426 | 8fab | A | 37 | 221 | 1.60E−15 | 0.16 | 0.71 | | | “IMMUNOGLOBULIN FAB FRAGMENT |
| | | | | | | | | | | FROM HUMAN IMMUNOGLOBULIN IGG1 |
| | | | | | | | | | | (LAMBDA, HIL) 8FAB 3” |
| 431 | 1sac | A | 150 | 355 | 3.40E−19 | | | 66.32 | | AMYLOID PROTEIN SERUM AMYLOID P |
| | | | | | | | | | | COMPONENT (SAP) 1SAC 3 |
| 432 | 1bu7 | A | 39 | 499 | 6.80E−68 | 0.49 | 1 | | “CYTOCHROME P450; | “OXIDOREDUCTASE FATTY ACID |
| | | | | | | | | | CHAIN: A, B;” | HYDROXYLASE; FATTY ACID |
| | | | | | | | | | | MONOOXYGENASE, HEMOPROTEIN, P450 |
| | | | | | | | | | | REMARK” |
| 432 | 1bu7 | A | 34 | 499 | 6.80E−68 | | | 191.84 | “CYTOCHROME P450; | “OXIDOREDUCTASE FATTY ACID |
| | | | | | | | | | CHAIN: A, B;” | HYDROXYLASE; FATTY ACID |
| | | | | | | | | | | MONOOXYGENASE, HEMOPROTEIN, P450 |
| | | | | | | | | | | REMARK” |
| 432 | 1cpt | | 236 | 460 | 3.40E−20 | −0.68 | 0 | | | OXIDOREDUCTASE(OXYGENASE) |
| | | | | | | | | | | CYTOCHROME P450-TERP 1CPT 3 |
| 432 | 1dt6 | A | 38 | 495 | 0 | 0.56 | 1 | | CYTOCHROME P450 2C5; | “OXIDOREDUCTASE PROGESTERONE 21- |
| | | | | | | | | | CHAIN: A; | HYDROXYLASE, CYPIIC5 P450 1, |
| | | | | | | | | | | MEMBRANE PROTEIN, PROGESTERONE |
| | | | | | | | | | | 21-HYDROXYLASE, BENZO(A) 2 PYRENE |
| | | | | | | | | | | HYDROXYLASE, ESTRADIOL 2- |
| | | | | | | | | | | HYDROXYLASE, P450, CYP2C5” |
| 432 | 1f26 | A | 58 | 463 | 2.10E−72 | 0.39 | 1 | | NITRIC OXIDE REDUCTASE; | “OXIDOREDUCTASE NITRIC OXIDE |
| | | | | | | | | | CHAIN: A; | REDUCTASE, CYTOCHROME P450NOR” |
| 432 | 1f26 | A | 128 | 463 | 6.80E−20 | −0.11 | 0.63 | | NITRIC OXIDE REDUCTASE; | “OXIDOREDUCTASE NITRIC OXIDE |
| | | | | | | | | | CHAIN: A; | REDUCTASE, CYTOCHROME P450NOR” |
| 432 | 1f4t | A | 69 | 494 | 8.40E−71 | 0.09 | 1 | | “CYTOCHROME P450 119; | OXIDOREDUCTASE CYP119; P450 FOLD |
| | | | | | | | | | CHAIN: A, B;” | |
| 432 | 1f4t | A | 287 | 474 | 3.40E−18 | −0.6 | 0.25 | | “CYTOCHROME P450 119; | OXIDOREDUCTASE CYP119; P450 FOLD |
| | | | | | | | | | CHAIN: A, B;” | |
| 432 | 1oxa | | 70 | 463 | 8.50E−27 | 0.11 | 1 | | CYTOCHROME P450 ERYF; | OXIDOREDUCTASE (OXYGENASE) |
| | | | | | | | | | 1OXA 5 CHAIN: NULL 1OXA 6 | |
| 432 | 1oxa | | 15 | 494 | 8.50E−27 | | | 96.86 | CYTOCHROME P450 ERYF; | OXIDOREDUCTASE (OXYGENASE) |
| | | | | | | | | | 1OXA 5 CHAIN: NULL 1OXA 6 | |
| 432 | 1qmq | A | 245 | 473 | 5.10E−11 | −0.63 | 0 | | CYTOCHROME P450; | “OXIDOREDUCTASE CAMPHOR 5- |
| | | | | | | | | | CHAIN: A; | MONOOXYGENASE |
| | | | | | | | | | | OXIDOREDUCTASE(OXYGENASE), RU- |
| | | | | | | | | | | SUBSTRATE,” |
| 433 | 1am5 | | 95 | 438 | 0 | 0.93 | 1 | | PEPSIN; CHAIN: NULL; | “ASPARTYL PROTEASE ACID |
| | | | | | | | | | | PROTEINASE; ASPARTYL PROTEASE, |
| | | | | | | | | | | ACID PROTEINASE, HYDROLASE” |
| 433 | 1am5 | | 94 | 438 | 0 | | | 303.61 | PEPSIN; CHAIN: NULL; | “ASPARTYL PROTEASE ACID |
| | | | | | | | | | | PROTEINASE; ASPARTYL PROTEASE, |
| | | | | | | | | | | ACID PROTEINASE, HYDROLASE” |
| 433 | 1dpj | A | 93 | 437 | 0 | 0.61 | 1 | | PROTEINASE A; CHAIN: A; | “HYDROLASE/HYDROLASE INHIBITOR |
| | | | | | | | | | PROTEINASE INHIBITOR | ASPARTATE PROTEASE; IA3; |
| | | | | | | | | | IA3 PEPTIDE; CHAIN: B; | PROTEINASE A, IA3 PEPTIDE” |
| 433 | 1hrn | A | 91 | 437 | 0 | 0.75 | 1 | | | ASPARTIC PROTEINASE RENIN |
| | | | | | | | | | | COMPLEXED WITH |
| | | | | | | | | | | POLYHYDROXYMONOAMIDE INHIBITOR |
| | | | | | | | | | | BILA 980 1HRN 3 |
| 433 | 1hrn | A | 91 | 438 | 0 | | | 337.47 | | ASPARTIC PROTEINASE RENIN |
| | | | | | | | | | | COMPLEXED WITH |
| | | | | | | | | | | POLYHYDROXYMONOAMIDE INHIBITOR |
| | | | | | | | | | | BILA 980 1HRN 3 |
| 433 | 1htr | B | 102 | 438 | 0 | 0.73 | 1 | | | ASPARTYL PROTEASE PROGASTRICSIN |
| | | | | | | | | | | (PEPSINOGEN C) (E.C.3.4.23.3) 1HTR 3 |
| | | | | | | | | | | 1HTR 87 |
| 433 | 1htr | B | 94 | 438 | 0 | | | 298.52 | | ASPARTYL PROTEASE PROGASTRICSIN |
| | | | | | | | | | | (PEPSINOGEN C) (E.C.3.4.23.3) 1HTR 3 |
| | | | | | | | | | | 1HTR 87 |
| 433 | 1lya | B | 198 | 438 | 6.80E−96 | 0.85 | 1 | | | LYSOSOMAL ASPARTIC PROTEASE |
| | | | | | | | | | | CATHEPSIN D (E.C.3.4.23.5) 1LYA 3 |
| 433 | 1lya | A | 94 | 189 | 4.20E−35 | 0.26 | 0.94 | | | LYSOSOMAL ASPARTIC PROTEASE |
| | | | | | | | | | | CATHEPSIN D (E.C.3.4.23.5) 1LYA 3 |
| 433 | 1lya | A | 93 | 197 | 1.50E−33 | −0.19 | 0.93 | | | LYSOSOMAL ASPARTIC PROTEASE |
| | | | | | | | | | | CATHEPSIN D (E.C.3.4.23.5) 1LYA 3 |
| 433 | 1lya | B | 198 | 438 | 6.80E−96 | | | 412.02 | | LYSOSOMAL ASPARTIC PROTEASE |
| | | | | | | | | | | CATHEPSIN D (E.C.3.4.23.5) 1LYA 3 |
| 433 | 1lya | A | 93 | 189 | 4.20E−35 | | | 168.02 | | LYSOSOMAL ASPARTIC PROTEASE |
| | | | | | | | | | | CATHEPSIN D (E.C.3.4.23.5) 1LYA 3 |
| 433 | 1qdm | A | 43 | 353 | 3.40E−89 | 0.29 | 0.98 | | “PROPHYTEPSIN; CHAIN: A, | “HYDROLASE ASPARTIC PROTEINASES, |
| | | | | | | | | | B, C;” | PHYTEPSIN, SAPOSIN-LIKE DOMAIN, 2 |
| | | | | | | | | | | ZYMOGEN STRUCTURE, HYDROLASE” |
| 433 | 1qdm | A | 58 | 438 | 3.40E−89 | | | 290.18 | “PROPHYTEPSIN; CHAIN: A, | “HYDROLASE ASPARTIC PROTEINASES, |
| | | | | | | | | | B, C;” | PHYTEPSIN, SAPOSIN-LIKE DOMAIN, 2 |
| | | | | | | | | | | ZYMOGEN STRUCTURE, HYDROLASE” |
| 433 | 1qrp | E | 94 | 438 | 0 | 1 | 1 | | PEPSIN 3A; CHAIN: E; IVA- | “HYDROLASE/HYDROLASE INHIBITOR |
| | | | | | | | | | VAL-VAL-LEU(P)-(O)PHE- | ASPARTIC PROTEINASE, PHOSPHONATE |
| | | | | | | | | | ALA-ALA-OME; CHAIN: I; | INHIBITOR, TRANSITION 2 STATE |
| | | | | | | | | | | ANALOGUE” |
| 433 | 1qrp | E | 95 | 438 | 0 | | | 325.28 | PEPSIN 3A; CHAIN: E; IVA- | “HYDROLASE/HYDROLASE INHIBITOR |
| | | | | | | | | | VAL-VAL-LEU(P)-(O)PHE- | ASPARTIC PROTEINASE, PHOSPHONATE |
| | | | | | | | | | ALA-ALA-OME; CHAIN: I; | INHIBITOR, TRANSITION 2 STATE |
| | | | | | | | | | | ANALOGUE” |
| 433 | 1smr | A | 96 | 437 | 0 | 0.86 | 1 | | | HYDROLASE(ASPARTIC PROTEINASE) |
| | | | | | | | | | | RENIN (E.C.3.4.23.15) COMPLEX WITH |
| | | | | | | | | | | THE INHIBITOR CH-66 1SMR 3 |
| 433 | 1smr | A | 89 | 438 | 0 | | | 346.22 | | HYDROLASE(ASPARTIC PROTEINASE) |
| | | | | | | | | | | RENIN (E.C.3.4.23.15) COMPLEX WITH |
| | | | | | | | | | | THE INHIBITOR CH-66 1SMR 3 |
| 433 | 3cms | | 94 | 437 | 0 | 0.96 | 1 | | | HYDROLASE (ACID PROTEINASE) |
| | | | | | | | | | | CHYMOSIN B (FORMERLY KNOWN AS |
| | | | | | | | | | | RENNIN) (E.C.3.4.23.4) MUTANT 3CMS 3 |
| | | | | | | | | | | WITH VAL 111 REPLACED BY PHE |
| | | | | | | | | | | (/V111F$) 3CMS 4 |
| 433 | 3cms | | 93 | 438 | 0 | | | 292.24 | | HYDROLASE (ACID PROTEINASE) |
| | | | | | | | | | | CHYMOSIN B (FORMERLY KNOWN AS |
| | | | | | | | | | | RENNIN) (E.C.3.4.23.4) MUTANT 3CMS 3 |
| | | | | | | | | | | WITH VAL 111 REPLACED BY PHE |
| | | | | | | | | | | (/V111F$) 3CMS 4 |
| 433 | 3psg | | 22 | 438 | 0 | 0.68 | 1 | | | HYDROLASE(ACID PROTEINASE |
| | | | | | | | | | | ZYMOGEN) PEPSINOGEN 3PSG 3 |
| 433 | 3psg | | 58 | 438 | 0 | | | 329.87 | | HYDROLASE(ACID PROTEINASE |
| | | | | | | | | | | ZYMOGEN) PEPSINOGEN 3PSG 3 |
| 433 | 4pep | | 95 | 438 | 0 | 1.05 | 1 | | | HYDROLASE (ACID PROTEINASE) PEPSIN |
| | | | | | | | | | | (E.C.3.4.23.1) 4PEP 4 |
| 433 | 4pep | | 95 | 438 | 0 | | | 330.33 | | HYDROLASE (ACID PROTEINASE) PEPSIN |
| | | | | | | | | | | (E.C.3.4.23.1) 4PEP 4 |
| 434 | 1a4j | L | 32 | 238 | 5.10E−26 | | | 56.92 | “IMMUNOGLOBULIN, DIELS | “IMMUNOGLOBULIN |
| | | | | | | | | | ALDER CATALYTIC | IMMUNOGLOBULIN, ANTIBODY, |
| | | | | | | | | | ANTIBODY; CHAIN: L, H, A, | CATALYTIC ANTIBODY, DIELS ALDER, 2 |
| | | | | | | | | | B;” | GERMLINE” |
| 434 | 1ad9 | L | 33 | 240 | 8.50E−27 | | | 53.79 | “FAB FRAGMENT CTM01; | “IMMUNOGLOBULIN |
| | | | | | | | | | CHAIN: L, H, A, B;” | IMMUNOGLOBULIN, FAB FRAGMENT” |
| 434 | 1ai1 | L | 32 | 248 | 6.80E−30 | | | 53.92 | “FAB59.1; CHAIN: L, H; | “COMPLEX (ANTIBODY/PEPTIDE) |
| | | | | | | | | | AIB142; CHAIN: P;” | COMPLEX (ANTIBODY/PEPTIDE), |
| | | | | | | | | | | ANTIBODY, CONSTRAINED HIV-1 V3 2 |
| | | | | | | | | | | LOOP PEPTIDE, IMMUNOGLOBULIN” |
| 434 | 1b2w | L | 33 | 240 | 1.70E−30 | | | 56.41 | ANTIBODY (LIGHT CHAIN); | “IMMUNE SYSTEM IMMUNOGLOBULIN; |
| | | | | | | | | | CHAIN: L; ANTIBODY | IMMUNOGLOBULIN ANTIBODY |
| | | | | | | | | | (HEAVY CHAIN); CHAIN: H; | ENGINEERING, HUMANIZED AND |
| | | | | | | | | | | CHIMERIC ANTIBODY, FAB, 2 X-RAY |
| | | | | | | | | | | STRUCTURE, THREE−DIMENSIONAL |
| | | | | | | | | | | STRYCTURE, GAMMA-3 INTERFERON, |
| | | | | | | | | | | IMMUNE SYSTEM” |
| 434 | 1b4j | L | 33 | 240 | 8.50E−29 | | | 55.89 | “ANTIBODY; CHAIN: L, H;” | “ANTIBODY ENGINEERING ANTIBODY |
| | | | | | | | | | | ENGINEERING, HUMANIZED AND |
| | | | | | | | | | | CHIMERIC ANTIBODIES, 2 FAB, X-RAY |
| | | | | | | | | | | STRUCTURES, GAMMA-INTERFERON” |
| 434 | 1bj1 | L | 33 | 239 | 5.10E−31 | | | 54.13 | “FAB FRAGMENT; CHAIN: L, | “COMPLEX (ANTIBODY/ANTIGEN) FAB- |
| | | | | | | | | | H, J, K; VASCULAR | 12; VEGF; COMPLEX |
| | | | | | | | | | ENDOTHELIAL GROWTH | (ANTIBODY/ANTIGEN), ANGIOGENIC |
| | | | | | | | | | FACTOR; CHAIN: V, W;” | FACTOR” |
| 434 | 1bjm | A | 34 | 250 | 1.20E−27 | | | 55.03 | “LOC-LAMBDA 1 TYPE | “IMMUNOGLOBULIN BENCE-JONES |
| | | | | | | | | | LIGHT-CHAIN DIMER; 1BJM | PROTEIN; 1BJM 8 BENCE JONES, |
| | | | | | | | | | 6 CHAIN: A, B; 1BJM 7” | ANTIBODY, MULTIPLE QUATERNARY |
| | | | | | | | | | | STRUCTURES 1BJM 13” |
| 434 | 1bog | A | 33 | 240 | 1.00E−28 | | | 55.49 | “ANTIBODY (CB 4-1); | “COMPLEX (ANTIBODY/PEPTIDE) |
| | | | | | | | | | CHAIN: A, B; PEPTIDE; | POLYSPECIFICITY, CROSS REACTIVITY, |
| | | | | | | | | | CHAIN: C;” | FAB-FRAGMENT, PEPTIDE, 2 HIV-1, |
| | | | | | | | | | | COMPLEX (ANTIBODY/PEPTIDE)” |
| 434 | 1ce1 | L | 33 | 237 | 3.40E−29 | | | 56.56 | CAMPATH-1H: LIGHT | “ANTIBODY THERAPEUTIC, ANTIBODY, |
| | | | | | | | | | CHAIN; CHAIN: L; | CD52” |
| | | | | | | | | | CAMPATH-1H: HEAVY | |
| | | | | | | | | | CHAIN; CHAIN: H; PEPTIDE | |
| | | | | | | | | | ANTIGEN; CHAIN: P; | |
| 434 | 1cly | L | 31 | 240 | 6.80E−27 | | | 55.41 | “IGG FAB (HUMAN IGG1, | “IMMUNOGLOBULIN CBR96 FAB |
| | | | | | | | | | KAPPA); CHAIN: L, H;” | (IMMUNOGLOBULIN); |
| | | | | | | | | | | IMMUNOGLOBULIN, IMMUNOGLOBULIN |
| | | | | | | | | | | C REGION, GLYCOPROTEIN, ANTIB” |
| 434 | 1clz | L | 29 | 240 | 6.80E−28 | | | 54.08 | “IGG FAB (IGG3, KAPPA); | “IMMUNOGLOBULIN MBR96 FAB |
| | | | | | | | | | CHAIN: L, H;” | (IMMUNOGLOBULIN); |
| | | | | | | | | | | IMMUNOGLOBULIN C REGION, |
| | | | | | | | | | | GLYCOPROTEIN, TRANSMEMBRANE” |
| 434 | 1dfb | L | 33 | 240 | 1.20E−29 | | | 54.53 | | IMMUNOGLOBULIN 3D6 FAB 1DFB 3 |
| 434 | 1fgn | L | 33 | 240 | 1.20E−29 | | | 54.11 | “IMMUNOGLOBULIN FAB | “IMMUNOGLOBULIN FAB, FAB LIGHT |
| | | | | | | | | | 5G9; CHAIN: L, H;” | CHAIN, FAB HEAVY CHAIN; ANTIBODY, |
| | | | | | | | | | | FAB, ANTI-TF, MONOCLONAL, MURINE, |
| | | | | | | | | | | IMMUNOGLOBULIN” |
| 434 | 1fvd | A | 33 | 240 | 1.70E−30 | | | 60.53 | | “IMMUNOGLOBULIN FAB FRAGMENT OF |
| | | | | | | | | | | HUMANIZED ANTIBODY 4D5, VERSION 4 |
| | | | | | | | | | | 1FVD 3” |
| 434 | 1gcl | L | 33 | 237 | 3.40E−29 | | | 54.38 | “ENVELOPE PROTEIN | “COMPLEX (HIV ENVELOPE |
| | | | | | | | | | GP120; CHAIN: G; CD4; | PROTEIN/CD4/FAB) COMPLEX (HIV |
| | | | | | | | | | CHAIN: C; ANTIBODY 17B; | ENVELOPE PROTEIN/CD4/FAB), HIV-1 |
| | | | | | | | | | CHAIN: L, H;” | EXTERIOR 2 ENVELOPE GP 120, T-CELL |
| | | | | | | | | | | SURFACE GLYCOPROTEIN CD4, 3 |
| | | | | | | | | | | ANTIGEN-BINDING FRAGMENT OF |
| | | | | | | | | | | HUMAN IMMUNOGLOBULIN 17B, 4 |
| | | | | | | | | | | GLYCOSYLATED PROTEIN” |
| 434 | 1mim | L | 32 | 239 | 5.10E−28 | | | 54.32 | “CHIMERIC SDZ CHI621; | “IMMUNOGLOBULIN |
| | | | | | | | | | CHAIN: H, L;” | IMMUNOGLOBULIN, C REGION” |
| 434 | 1vca | A | 33 | 243 | 4.20E−11 | | | 64.99 | “HUMAN VASCULAR CELL | “CELL ADHESION PROTEIN VCAM-D1, 2; |
| | | | | | | | | | ADHESION MOLECULE-1; | 1VCA 6 IMMUNOGLOBULIN |
| | | | | | | | | | 1VCA 4 CHAIN: A, B; 1VCA | SUPERFAMILY, INTEGRIN-BINDING |
| | | | | | | | | | 5” | 1VCA 15” |
| 434 | 2fb4 | L | 32 | 250 | 1.70E−26 | | | 55.72 | | IMMUNOGLOBULIN IMMUNOGLOBULIN |
| | | | | | | | | | FAB 2FB4 4 | |
| 434 | 2fgw | L | 33 | 240 | 3.40E−31 | | | 54.51 | | IMMUNOGLOBULIN FAB FRAGMENT OF |
| | | | | | | | | | | A HUMANIZED VERSION OF THE ANTI- |
| | | | | | | | | | | CD18 2FGW3 ANTIBODY ‘H52’ (HUH52-OZ |
| | | | | | | | | | | FAB) 2FGW 4 |
| 434 | 2mcg | 1 | 33 | 250 | 3.40E−29 | | | 58.41 | | IMMUNOGLOBULIN IMMUNOGLOBULIN |
| | | | | | | | | | | LAMBDA LIGHT CHAIN DIMER (/MCG$) |
| | | | | | | | | | | 2MCG 3 (TRIGONAL FORM) 2MCG 4 |
| 434 | 3fct | A | 33 | 239 | 3.40E−28 | | | 55.8 | “METAL CHELATASE | “IMMUNE SYSTEM METAL CHELATASE, |
| | | | | | | | | | CATALYTIC ANTIBODY; | CATALYTIC ANTIBODY, FAB |
| | | | | | | | | | CHAIN: A, C; METAL | FRAGMENT, IMMUNE 2 SYSTEM” |
| | | | | | | | | | CHELATASE CATALYTIC | |
| | | | | | | | | | ANTIBODY; CHAIN: B, D;” | |
| 440 | 1c0p | A | 27 | 61 | 0.00017 | −0.31 | 0.18 | | D-AMINO ACID OXIDASE; | “OXIDOREDUCTASE ALPHA-BETA- |
| | | | | | | | | | CHAIN: A; | ALPHA MOTIF, FLAVIN CONTAINING |
| | | | | | | | | | | PROTEIN, OXIDASE” |
| 440 | 1cjc | A | 33 | 397 | 1.70E−09 | −0.15 | 0.03 | | ADRENODOXIN | “OXIDOREDUCTASE ADR, NADPH: |
| | | | | | | | | | REDUCTASE; CHAIN: A; | ADRENODOXIN OXIDOREDUCTASE; |
| | | | | | | | | | | FLAVOENZYME, MAD ANALYSIS, |
| | | | | | | | | | | ELECTRON TRANSFERASE” |
| 440 | 1d4d | A | 32 | 67 | 3.40E−09 | −0.13 | 0.12 | | FLAVOCYTOCHROME C | “OXIDOREDUCTASE TETRAHEME |
| | | | | | | | | | FUMARATE REDUCTASE; | FLAVOCYTOCHROME C FUMARATE |
| | | | | | | | | | CHAIN: A; | REDUCTASE, 2 OXIDOREDUCTASE” |
| 440 | 1djn | A | 28 | 429 | 1.00E−13 | −0.01 | 0.27 | | “TRIMETHYLAMINE | “OXIDOREDUCTASE IRON-SULFUR |
| | | | | | | | | | DEHYDROGENASE; CHAIN: | FLAVOPROTEIN, ELECTRON TRANSFER, |
| | | | | | | | | | A, B;” | OXIDOREDUCTASE” |
| 440 | 1el5 | A | 28 | 60 | 8.50E−07 | −0.05 | 0.43 | | “SARCOSINE OXIDASE; | “OXIDOREDUCTASE FLAVOPROTEIN, |
| | | | | | | | | | CHAIN: A, B;” | OXIDASE” |
| 440 | 1fum | A | 32 | 61 | 0.00017 | −0.49 | 0.05 | | “FUMARATE REDUCTASE | “OXIDOREDUCTASE COMPLEX II; |
| | | | | | | | | | FLAVOPROTEIN SUBUNIT; | COMPLEX II; COMPLEX II; COMPLEX II; |
| | | | | | | | | | CHAIN: A, M; FUMARATE | FUMARATE REDUCTASE, COMPLEX II, |
| | | | | | | | | | REDUCTASE IRON-SULFUR | SUCCINATE DEHYDROGENASE, 2 |
| | | | | | | | | | PROTEIN; CHAIN: B, N; | RESPIRATION, OXIDOREDUCTASE” |
| | | | | | | | | | FUMARATE REDUCTASE 15 | |
| | | | | | | | | | KD HYDROPHOBIC | |
| | | | | | | | | | PROTEIN; CHAIN: C, O; | |
| | | | | | | | | | FUMARATE REDUCTASE 13 | |
| | | | | | | | | | KD HYDROPHOBIC | |
| | | | | | | | | | PROTEIN; CHAIN: D, P;” | |
| 440 | 1ges | A | 30 | 542 | 0 | | | 70.22 | | “OXIDOREDUCTASE(FLAVOENZYME) |
| | | | | | | | | | | GLUTATHIONE REDUCTASE (E.C.1.6.4.2) |
| | | | | | | | | | | NAD MUTANT WITH ALA 179 1GES 3 |
| | | | | | | | | | | REPLACED BY GLY, ALA 183 BY GLY, |
| | | | | | | | | | | VAL 197 BY GLU, ARG 198 BY 1GES 4 |
| | | | | | | | | | | MET, LYS 199 BY PHE, HIS 200 BY ASP, |
| | | | | | | | | | | AND ARG 204 BY PHE 1GES 5 |
| | | | | | | | | | | (A179G, A183G, V197E, R198M, K199F, H200D, |
| | | | | | | | | | | R204P) COMPLEXED WITH 1GES 6 NAD |
| | | | | | | | | | | 1GES 7” |
| 440 | 1lpf | A | 28 | 560 | 0 | −0.3 | 0 | | | OXIDOREDUCTASE DIHYDROLIPOAMIDE |
| | | | | | | | | | | DEHYDROGENASE (E.C.1.8.1.4) COMPLEX |
| | | | | | | | | | | WITH 1LPF 3 FLAVIN-ADENINE- |
| | | | | | | | | | | DINUCLEOTIDE (FAD) 1LPF 4 |
| 440 | 1pbe | | 27 | 62 | 0.00068 | −0.25 | 0.04 | | | OXIDOREDUCTASE P- |
| | | | | | | | | | | HYDROXYBENZOATE HYDROXYLASE |
| | | | | | | | | | | (PHBH) (E.C.1.14.13.2) 1PBE 3 COMPLEXED |
| | | | | | | | | | | WITH P-HYDROXYBENZOIC ACID 1PBE 4 |
| 440 | 1qjd | A | 32 | 423 | 8.50E−09 | 0.03 | 0.37 | | FLAVOCYTOCHROME C3; | “FUMARATE REDUCTASE FUMARATE |
| | | | | | | | | | CHAIN: A | REDUCTASE, RESPIRATORY FUMARATE |
| | | | | | | | | | | REDUCTASE” |
| 440 | 1qo8 | A | 33 | 185 | 1.70E−07 | −0.08 | 0.8 | | “FLAVOCYTOCHROME C3 | OXIDOREDUCTASE OXIDOREDUCTASE |
| | | | | | | | | | FUMARATE REDUCTASE; | |
| | | | | | | | | | CHAIN: A, D;” | |
| 440 | 1trb | | 28 | 413 | 1.20E−56 | −0.16 | 0.68 | | | OXIDOREDUCTASE (FLAVOENZYME) |
| | | | | | | | | | | THIOREDOXIN REDUCTASE (E.C.1.6.4.5) |
| | | | | | | | | | | MUTANT WITH CYS 138 1TRB 3 |
| | | | | | | | | | | REPLACED BY SER (C138S) 1TRB 4 |
| 440 | 1vdc | | 32 | 412 | 1.20E−50 | 0.01 | 0.17 | | NADPH DEPENDENT | “OXIDOREDUCTASE NTR; |
| | | | | | | | | | THIOREDOXIN | HYPOTHETICAL PROTEIN, REDOX- |
| | | | | | | | | | REDUCTASE; CHAIN: NULL; | ACTIVE CENTER, OXIDOREDUCTASE, 2 |
| | | | | | | | | | | DISULFIDE OXIDOREDUCTASE, |
| | | | | | | | | | | THIOREDOXIN REDUCTASE, FLAVIN 3 |
| | | | | | | | | | | ADENINE DINULEOTIDE” |
| 440 | 3grs | | 28 | 548 | 0 | | | 78.44 | | “OXIDOREDUCTASE (FLAVOENZYME) |
| | | | | | | | | | | GLUTATHIONE REDUCTASE (E.C.1.6.4.2), |
| | | | | | | | | | | OXIDIZED FORM (E) 3GRS 4” |
| 441 | 1bxk | A | 94 | 397 | 8.40E−67 | 0.67 | 1 | | “DTDP-GLUCOSE 4,6- | “LYASE EPIMERASE, DEHYDRATASE, |
| | | | | | | | | | DEHYDRATASE; CHAIN: A, | DEHYDROGENASE, LYASE” |
| | | | | | | | | | B;” | |
| 441 | 1bxk | A | 93 | 412 | 8.40E−67 | | | 150.09 | “DTDP-GLUCOSE 4,6- | “LYASE EPIMERASE, DEHYDRATASE, |
| | | | | | | | | | DEHYDRATASE; CHAIN: A, | DEHYDROGENASE, LYASE” |
| | | | | | | | | | B;” | |
| 441 | 1db3 | A | 94 | 404 | 1.40E−68 | 0.54 | 1 | | “GDP-MANNOSE 4,6- | “LYASE DEHYDRATASE, NADP, GDP- |
| | | | | | | | | | DEHYDRATASE; CHAIN: A;” | MANNOSE, GDP-FUCOSE” |
| 441 | 1db3 | A | 93 | 424 | 1.40E−68 | | | 97.96 | “GDP-MANNOSE 4,6- | “LYASE DEHYDRATASE, NADP, GDP- |
| | | | | | | | | | DEHYDRATASE; CHAIN: A;” | MANNOSE, GDP-FUCOSE” |
| 441 | 1ek6 | A | 94 | 398 | 5.60E−66 | 0.43 | 1 | | “UDP-GALACTOSE 4- | “ISOMERASE EPIMERASE, SHORT-CHAIN |
| | | | | | | | | | EPIMERASE; CHAIN: A, B;” | DEHYDROGENASE, GALACTOSEMIA” |
| 445 | 1ile | | 6 | 55 | 0.0085 | −0.9 | 0.06 | | ISOLEUCYL-TRNA | AMINOACYL-TRNA SYNTHETASE ILERS; |
| | | | | | | | | | SYNTHETASE; CHAIN: | AMINOACYL-TRNA SYNTHETASE |
| | | | | | | | | | NULL; | |
| 450 | 1alh | A | 239 | 320 | 4.20E−45 | 0.34 | 1 | | “QGSR ZINC FINGER | “COMPLEX (ZINC FINGER/DNA) |
| | | | | | | | | | PEPTIDE; CHAIN: A; | COMPLEX (ZINC FINGER/DNA), ZINC |
| | | | | | | | | | DUPLEX | FINGER, DNA-BINDING PROTEIN” |
| | | | | | | | | | OLIGONUCLEOTIDE | |
| | | | | | | | | | BINDING SITE; CHAIN: B, | |
| | | | | | | | | | C;” | |
| 450 | 1alh | A | 295 | 376 | 4.20E−43 | 0.13 | 0.98 | | “QGSR ZINC FINGER | “COMPLEX (ZINC FINGER/DNA) |
| | | | | | | | | | PEPTIDE; CHAIN: A; | COMPLEX (ZINC FINGER/DNA), ZINC |
| | | | | | | | | | DUPLEX | FINGER, DNA-BINDING PROTEIN” |
| | | | | | | | | | OLIGONUCLEOTIDE | |
| | | | | | | | | | BINDING SITE; CHAIN: B, | |
| | | | | | | | | | C;” | |
| 450 | 1alh | A | 267 | 348 | 6.30E−43 | 0.2 | 1 | | “QGSR ZINC FINGER | “COMPLEX (ZINC FINGER/DNA) |
| | | | | | | | | | PEPTIDE; CHAIN: A; | COMPLEX (ZINC FINGER/DNA), ZINC |
| | | | | | | | | | DUPLEX | FINGER, DNA-BINDING PROTEIN” |
| | | | | | | | | | OLIGONUCLEOTIDE | |
| | | | | | | | | | BINDING SITE; CHAIN: B, | |
| | | | | | | | | | C;” | |
| 450 | 1alh | A | 435 | 516 | 4.20E−42 | 0.26 | 0.98 | | “QGSR ZINC FINGER | “COMPLEX (ZINC FINGER/DNA) |
| | | | | | | | | | PEPTIDE; CHAIN: A; | COMPLEX (ZINC FINGER/DNA), ZINC |
| | | | | | | | | | DUPLEX | FINGER, DNA-BINDING PROTEIN” |
| | | | | | | | | | OLIGONUCLEOTIDE | |
| | | | | | | | | | BINDING SITE; CHAIN: B, | |
| | | | | | | | | | C;” | |
| 450 | 1alh | A | 407 | 488 | 1 .30E−38 | 0.27 | 1 | | “QGSR ZINC FINGER | “COMPLEX (ZINC FINGER/DNA) |
| | | | | | | | | | PEPTIDE; CHAIN: A; | COMPLEX (ZINC FINGER/DNA), ZINC |
| | | | | | | | | | DUPLEX | FINGER, DNA-BINDING PROTEIN” |
| | | | | | | | | | OLIGONUCLEOTIDE | |
| | | | | | | | | | BINDING SITE; CHAIN: B, | |
| | | | | | | | | | C;” | |
| 450 | 1alh | A | 519 | 627 | 6.30E−38 | −0.18 | 0.21 | | “QGSR ZINC FINGER | “COMPLEX (ZINC FINGER/DNA) |
| | | | | | | | | | PEPTIDE; CHAIN: A; | COMPLEX (ZINC FINGER/DNA), ZINC |
| | | | | | | | | | DUPLEX | FINGER, DNA-BINDING PROTEIN” |
| | | | | | | | | | OLIGONUCLEOTIDE | |
| | | | | | | | | | BINDING SITE; CHAIN: B, | |
| | | | | | | | | | C;” | |
| 450 | 1alh | A | 267 | 349 | 4.20E−45 | | | 81.01 | “QGSR ZINC FINGER | “COMPLEX (ZINC FINGER/DNA) |
| | | | | | | | | | PEPTIDE; CHAIN: A; | COMPLEX (ZINC FINGER/DNA), ZINC |
| | | | | | | | | | DUPLEX | FINGER, DNA-BINDING PROTEIN” |
| | | | | | | | | | OLIGONUCLEOTIDE | |
| | | | | | | | | | BINDING SITE; CHAIN: B, | |
| | | | | | | | | | C;” | |
| 450 | 1ard | | 407 | 435 | 1.90E−10 | 0.36 | 0.82 | | | “TRANSCRIPTION REGULATION YEAST |
| | | | | | | | | | | TRANSCRIPTION FACTOR ADR1 |
| | | | | | | | | | | (RESIDUES 102-130) 1ARD 3 (AMINO |
| | | | | | | | | | | TERMINAL ZINC FINGER DOMAIN) (NMR, |
| | | | | | | | | | | 10 STRUCTURES) 1ARD 4 (ADR1B) 1ARD |
| | | | | | | | | | | 5” |
| 450 | 1ard | | 575 | 603 | 1.30E−09 | −0.36 | 0.05 | | | “TRANSCRIPTION REGULATION YEAST |
| | | | | | | | | | | TRANSCRIPTION FACTOR ADR1 |
| | | | | | | | | | | (RESIDUES 102-130) 1ARD 3 (AMINO |
| | | | | | | | | | | TERMINAL ZINC FINGER DOMAIN) (NMR, |
| | | | | | | | | | | 10 STRUCTURES) 1ARD 4 (ADR1B) 1ARD |
| | | | | | | | | | | 5” |
| 450 | 1ard | | 547 | 575 | 2.10E−07 | 0.02 | 0.11 | | | “TRANSCRIPTION REGULATION YEAST |
| | | | | | | | | | | TRANSCRIPTION FACTOR ADR1 |
| | | | | | | | | | | (RESIDUES 102-130) 1ARD 3 (AMINO |
| | | | | | | | | | | TERMINAL ZINC FINGER DOMAIN) (NMR, |
| | | | | | | | | | | 10 STRUCTURES) 1ARD 4 (ADR1B) 1ARD |
| | | | | | | | | | | 5” |
| 450 | 1ubd | C | 236 | 347 | 4.20E−54 | 0.31 | 1 | | “YY1; CHAIN: C; ADENO- | “COMPLEX (TRANSCRIPTION |
| | | | | | | | | | ASSOCIATED VIRUS P5 | REGULATION/DNA) YING-YANG 1; |
| | | | | | | | | | INITIATOR ELEMENT DNA; | TRANSCRIPTION INITIATION, INITIATOR |
| | | | | | | | | | CHAIN: A, B;” | ELEMENT, YY1, ZINC 2 FINGER PROTEIN, |
| | | | | | | | | | | DNA-PROTEIN RECOGNITION, 3 |
| | | | | | | | | | | COMPLEX (TRANSCRIPTION |
| | | | | | | | | | | REGULATION/DNA)” |
| 450 | 1ubd | C | 461 | 571 | 1.90E−53 | −0.1 | 1 | | “YY1; CHAIN: C; ADENO- | “COMPLEX (TRANSCRIPTION |
| | | | | | | | | | ASSOCIATED VIRUS P5 | REGULATION/DNA) YING-YANG 1; |
| | | | | | | | | | INITIATOR ELEMENT DNA; | TRANSCRIPTION INITIATION, INITIATOR |
| | | | | | | | | | CHAIN: A, B;” | ELEMENT, YY1, ZINC 2 FINGER PROTEIN, |
| | | | | | | | | | | DNA-PROTEIN RECOGNITION, 3 |
| | | | | | | | | | | COMPLEX (TRANSCRIPTION |
| | | | | | | | | | | REGULATION/DNA)” |
| 450 | 1ubd | C | 488 | 628 | 8.40E−52 | −0.33 | 0.52 | | “YY1; CHAIN: C; ADENO- | “COMPLEX (TRANSCRIPTION |
| | | | | | | | | | ASSOCIATED VIRUS P5 | REGULATION/DNA) YING-YANG 1; |
| | | | | | | | | | INITIATOR ELEMENT DNA; | TRANSCRIPTION INITIATION, INITIATOR |
| | | | | | | | | | CHAIN: A, B;” | ELEMENT, YY1, ZINC 2 FINGER PROTEIN, |
| | | | | | | | | | | DNA-PROTEIN RECOGNITION, 3 |
| | | | | | | | | | | COMPLEX (TRANSCRIPTION |
| | | | | | | | | | | REGULATION/DNA)” |
| 450 | 1ubd | C | 320 | 431 | 8.40E−51 | 0.18 | 0.99 | | “YY1; CHAIN: C; ADENO- | “COMPLEX (TRANSCRIPTION |
| | | | | | | | | | ASSOCIATED VIRUS P5 | REGULATION/DNA) YING-YANG 1; |
| | | | | | | | | | INITIATOR ELEMENT DNA; | TRANSCRIPTION INITIATION, INITIATOR |
| | | | | | | | | | CHAIN: A, B;” | ELEMENT, YY1, ZINC 2 FINGER PROTEIN, |
| | | | | | | | | | | DNA-PROTEIN RECOGNITION, 3 |
| | | | | | | | | | | COMPLEX (TRANSCRIPTION |
| | | | | | | | | | | REGULATION/DNA)” |
| 450 | 1ubd | C | 376 | 515 | 1.50E−49 | −0.04 | 0.66 | | “YY1; CHAIN: C; ADENO- | “COMPLEX (TRANSCRIPTION |
| | | | | | | | | | ASSOCIATED VIRUS P5 | REGULATION/DNA) YING-YANG 1; |
| | | | | | | | | | INITIATOR ELEMENT DNA; | TRANSCRIPTION INITIATION, INITIATOR |
| | | | | | | | | | CHAIN: A, B;” | ELEMENT, YY1, ZINC 2 FINGER PROTEIN, |
| | | | | | | | | | | DNA-PROTEIN RECOGNITION, 3 |
| | | | | | | | | | | COMPLEX (TRANSCRIPTION |
| | | | | | | | | | | REGULATION/DNA)” |
| 450 | 1ubd | C | 348 | 460 | 1.30E−48 | −0.19 | 0.99 | | “YY1; CHAIN: C; ADENO- | “COMPLEX (TRANSCRIPTION |
| | | | | | | | | | ASSOCIATED VIRUS P5 | REGULATION/DNA) YING-YANG 1; |
| | | | | | | | | | INITIATOR ELEMENT DNA; | TRANSCRIPTION INITIATION, INITIATOR |
| | | | | | | | | | CHAIN: A, B;” | ELEMENT, YY1, ZINC 2 FINGER PROTEIN, |
| | | | | | | | | | | DNA-PROTEIN RECOGNITION, 3 |
| | | | | | | | | | | COMPLEX (TRANSCRIPTION |
| | | | | | | | | | | REGULATION/DNA)” |
| 450 | 1ubd | C | 185 | 291 | 2.10E−46 | 0.06 | 1 | | “YY1; CHAIN: C; ADENO- | “COMPLEX (TRANSCRIPTION |
| | | | | | | | | | ASSOCIATED VIRUS P5 | REGULATION/DNA) YING-YANG 1; |
| | | | | | | | | | INITIATOR ELEMENT DNA; | TRANSCRIPTION INITIATION, INITIATOR |
| | | | | | | | | | CHAIN: A, B;” | ELEMENT, YY1, ZINC 2 FINGER PROTEIN, |
| | | | | | | | | | | DNA-PROTEIN RECOGNITION, 3 |
| | | | | | | | | | | COMPLEX (TRANSCRIPTION |
| | | | | | | | | | | REGULATION/DNA)” |
| 450 | 1ubd | C | 266 | 376 | 4.20E−54 | | | 87.98 | “YY1; CHAIN: C; ADENO- | “COMPLEX (TRANSCRIPTION |
| | | | | | | | | | ASSOCIATED VIRUS P5 | REGULATION/DNA) YING-YANG 1; |
| | | | | | | | | | INITIATOR ELEMENT DNA; | TRANSCRIPTION INITIATION, INITIATOR |
| | | | | | | | | | CHAIN: A, B;” | ELEMENT, YY1, ZINC 2 FINGER PROTEIN, |
| | | | | | | | | | | DNA-PROTEIN RECOGNITION, 3 |
| | | | | | | | | | | COMPLEX (TRANSCRIPTION |
| | | | | | | | | | | REGULATION/DNA)” |
| 450 | 2gli | A | 238 | 377 | 4.20E−71 | 0.32 | 1 | | “ZINC FINGER PROTEIN | “COMPLEX (DNA-BINDING |
| | | | | | | | | | GLI1; CHAIN: A; DNA; | PROTEIN/DNA) FIVE-FINGER GLI; GLI, |
| | | | | | | | | | CHAIN: C, D;” | ZINC FINGER, COMPLEX (DNA-BINDING |
| | | | | | | | | | | PROTEIN/DNA)” |
| 450 | 2gli | A | 350 | 517 | 8.40E−69 | −0.04 | 0.96 | | “ZINC FINGER PROTEIN | “COMPLEX (DNA-BINDING |
| | | | | | | | | | GLI1; CHAIN: A; DNA; | PROTEIN/DNA) FIVE-FINGER GLI; GLI, |
| | | | | | | | | | CHAIN: C, D;” | ZINC FINGER, COMPLEX (DNA-BINDING |
| | | | | | | | | | | PROTEIN/DNA)” |
| 450 | 2gli | A | 266 | 432 | 4.20E−67 | −0.34 | 0.95 | | “ZINC FINGER PROTEIN | “COMPLEX (DNA-BINDING |
| | | | | | | | | | GLI1; CHAIN: A; DNA; | PROTEIN/DNA) FIVE-FINGER GLI; GLI, |
| | | | | | | | | | CHAIN: C, D;” | ZINC FINGER, COMPLEX (DNA-BINDING |
| | | | | | | | | | | PROTEIN/DNA)” |
| 450 | 2gli | A | 406 | 572 | 1.10E−66 | 0.05 | 0.96 | | “ZINC FINGER PROTEIN | “COMPLEX (DNA-BINDING |
| | | | | | | | | | GLI1; CHAIN: A; DNA; | PROTEIN/DNA) FIVE-FINGER GLI; GLI, |
| | | | | | | | | | CHAIN: C, D;” | ZINC FINGER, COMPLEX (DNA-BINDING |
| | | | | | | | | | | PROTEIN/DNA)” |
| 450 | 2gli | A | 183 | 321 | 6.30E−63 | 0.18 | 0.98 | | “ZINC FINGER PROTEIN | “COMPLEX (DNA-BINDING |
| | | | | | | | | | GLI1; CHAIN: A; DNA; | PROTEIN/DNA) FIVE-FINGER GLI; GLI, |
| | | | | | | | | | CHAIN: C, D;” | ZINC FINGER, COMPLEX (DNA-BINDING |
| | | | | | | | | | | PROTEIN/DNA)” |
| 450 | 2gli | A | 462 | 628 | 4.20E−51 | −0.01 | 0.57 | | “ZINC FINGER PROTEIN | “COMPLEX (DNA-BINDING |
| | | | | | | | | | GLI1; CHAIN: A; DNA; | PROTEIN/DNA) FIVE-FINGER GLI; GLI, |
| | | | | | | | | | CHAIN: C, D;” | ZINC FINGER, COMPLEX (DNA-BINDING |
| | | | | | | | | | | PROTEIN/DNA)” |
| 450 | 2gli | A | 103 | 265 | 2.10E−24 | −0.47 | 0.06 | | “ZINC FINGER PROTEIN | “COMPLEX (DNA-BINDING |
| | | | | | | | | | GLI1; CHAIN: A; DNA; | PROTEIN/DNA) FIVE-FINGER GLI; GLI, |
| | | | | | | | | | CHAIN: C, D;” | ZINC FINGER, COMPLEX (DNA-BINDING |
| | | | | | | | | | | PROTEIN/DNA)” |
| 450 | 2gli | A | 238 | 377 | 4.20E−71 | | | 97.21 | “ZINC FINGER PROTEIN | “COMPLEX (DNA-BINDING |
| | | | | | | | | | GLI1; CHAIN: A; DNA; | PROTEIN/DNA) FIVE-FINGER GLI; GLI, |
| | | | | | | | | | CHAIN: C, D;” | ZINC FINGER, COMPLEX (DNA-BINDING |
| | | | | | | | | | | PROTEIN/DNA)” |
| 450 | 3znf | | 547 | 575 | 0.0063 | 0.51 | 0.4 | | | ZINC FINGER /DNA$ BINDING DOMAIN |
| | | | | | | | | | | ZINC FINGER (/NMR$) 3ZNF 3 |
| 455 | 1chc | | 137 | 192 | 1.50E−05 | 0.11 | 0.43 | | | “VIRUS EQUINE HERPES VIRUS-1 (C3HC4, |
| | | | | | | | | | | OR RING DOMAIN) 1CHC 3 (NMR, 1 |
| | | | | | | | | | | STRUCTURE) 1CHC 4” |
| 455 | 1dvp | A | 142 | 170 | 0.0021 | −0.12 | 0.15 | | HEPATOCYTE GROWTH | “TRANSFERASE HRS; HRS, VHS, FYVE, |
| | | | | | | | | | FACTOR-REGULATED | ZINC FINGER, SUPERHELIX” |
| | | | | | | | | | TYROSINE CHAIN: A; | |
| 455 | 1rmd | | 139 | 192 | 4.20E−07 | −0.04 | 0.29 | | RAG1; CHAIN: NULL; | “DNA-BINDING PROTEIN V(D)J |
| | | | | | | | | | | RECOMBINATION ACTIVATING PROTEIN |
| | | | | | | | | | | 1; RAG1, V(D)J RECOMBINATION, |
| | | | | | | | | | | ANTIBODY, MAD, RING FINGER, 2 ZINC |
| | | | | | | | | | | BINUCLEAR CLUSTER, ZINC FINGER, |
| | | | | | | | | | | DNA-BINDING PROTEIN” |
| 455 | 1vfy | A | 142 | 170 | 0.0011 | −0.21 | 0 | | PHOSPHATIDYLINOSITOL- | “TRANSPORT PROTEIN FYVE DOMAIN, |
| | | | | | | | | | 3-PHOSPHATE BINDING | ENDOSOME MATURATION, |
| | | | | | | | | | FYVE CHAIN: A; | INTRACELLULAR TRAFFICKING, 2 |
| | | | | | | | | | | TRANSPORT PROTEIN” |
| 456 | 1alh | A | 206 | 287 | 2.10E−40 | 0.42 | 1 | | “QGSR ZINC FINGER | “COMPLEX (ZINC FINGER/DNA) |
| | | | | | | | | | PEPTIDE; CHAIN: A; | COMPLEX (ZINC FINGER/DNA), ZINC |
| | | | | | | | | | DUPLEX | FINGER, DNA-BINDING PROTEIN” |
| | | | | | | | | | OLIGONUCLEOTIDE | |
| | | | | | | | | | BINDING SITE; CHAIN: B, | |
| | | | | | | | | | C;” | |
| 456 | 1alh | A | 319 | 399 | 1.30E−38 | 0.37 | 1 | | “QGSR ZINC FINGER | “COMPLEX (ZINC FINGER/DNA) |
| | | | | | | | | | PEPTIDE; CHAIN: A; | COMPLEX (ZINC FINGER/DNA), ZINC |
| | | | | | | | | | DUPLEX | FINGER, DNA-BINDING PROTEIN” |
| | | | | | | | | | OLIGONUCLEOTIDE | |
| | | | | | | | | | BINDING SITE; CHAIN: B, | |
| | | | | | | | | | C;” | |
| 456 | 1alh | A | 153 | 230 | 6.30E−37 | 0.38 | 1 | | “QGSR ZINC FINGER | “COMPLEX (ZINC FINGER/DNA) |
| | | | | | | | | | PEPTIDE; CHAIN: A; | COMPLEX (ZINC FINGER/DNA), ZINC |
| | | | | | | | | | DUPLEX | FINGER, DNA-BINDING PROTEIN” |
| | | | | | | | | | OLIGONUCLEOTIDE | |
| | | | | | | | | | BINDING SITE; CHAIN: B, | |
| | | | | | | | | | C;” | |
| 456 | 1alh | A | 318 | 398 | 1.50E−30 | 0.55 | 1 | | “QGSR ZINC FINGER | “COMPLEX (ZINC FINGER/DNA) |
| | | | | | | | | | PEPTIDE; CHAIN: A; | COMPLEX (ZINC FINGER/DNA), ZINC |
| | | | | | | | | | DUPLEX | FINGER, DNA-BINDING PROTEIN” |
| | | | | | | | | | OLIGONUCLEOTIDE | |
| | | | | | | | | | BINDING SITE; CHAIN: B, | |
| | | | | | | | | | C;” | |
| 456 | 1alh | A | 122 | 202 | 5.10E−28 | 0.05 | 0.55 | | “QGSR ZINC FINGER | “COMPLEX (ZINC FINGER/DNA) |
| | | | | | | | | | PEPTIDE; CHAIN: A; | COMPLEX (ZINC FINGER/DNA), ZINC |
| | | | | | | | | | DUPLEX | FINGER, DNA-BINDING PROTEIN” |
| | | | | | | | | | OLIGONUCLEOTIDE | |
| | | | | | | | | | BINDING SITE; CHAIN: B, | |
| | | | | | | | | | C;” | |
| 456 | 1alh | A | 206 | 288 | 2.10E−40 | | | 74.69 | “QGSR ZINC FINGER | “COMPLEX (ZINC FINGER/DNA) |
| | | | | | | | | | PEPTIDE; CHAIN: A; | COMPLEX (ZINC FINGER/DNA), ZINC |
| | | | | | | | | | DUPLEX | FINGER, DNA-BINDING PROTEIN” |
| | | | | | | | | | OLIGONUCLEOTIDE | |
| | | | | | | | | | BINDING SITE; CHAIN: B, | |
| | | | | | | | | | C;” | |
| 456 | 1mey | C | 233 | 314 | 5.10E−51 | 0.5 | 1 | | “DNA; CHAIN: A, B, D, E; | “COMPLEX (ZINC FINGER/DNA) ZINC |
| | | | | | | | | | CONSENSUS ZINC FINGER | FINGER, PROTEIN-DNA INTERACTION, |
| | | | | | | | | | PROTEIN; CHAIN: C, F, G;” | PROTEIN DESIGN, 2 CRYSTAL |
| | | | | | | | | | | STRUCTURE, COMPLEX (ZINC |
| | | | | | | | | | | FINGER/DNA)” |
| 456 | 1mey | C | 261 | 342 | 6.80E−51 | 0.51 | 1 | | “DNA; CHAIN: A, B, D, E; | “COMPLEX (ZINC FINGER/DNA) ZINC |
| | | | | | | | | | CONSENSUS ZINC FINGER | FINGER, PROTEIN-DNA INTERACTION, |
| | | | | | | | | | PROTEIN; CHAIN: C, F, G;” | PROTEIN DESIGN, 2 CRYSTAL |
| | | | | | | | | | | STRUCTURE, COMPLEX (ZINC |
| | | | | | | | | | | FINGER/DNA)” |
| 456 | 1mey | C | 345 | 426 | 1.00E−50 | 0.51 | 1 | | “DNA; CHAIN: A, B, D, E; | “COMPLEX (ZINC FINGER/DNA) ZINC |
| | | | | | | | | | CONSENSUS ZINC FINGER | FINGER, PROTEIN-DNA INTERACTION, |
| | | | | | | | | | PROTEIN; CHAIN: C, F, G;” | PROTEIN DESIGN, 2 CRYSTAL |
| | | | | | | | | | | STRUCTURE, COMPLEX (ZINC |
| | | | | | | | | | | FINGER/DNA)” |
| 456 | 1mey | C | 289 | 370 | 1.00E−50 | 0.32 | 1 | | “DNA; CHAIN: A, B, D, E; | “COMPLEX (ZINC FINGER/DNA) ZINC |
| | | | | | | | | | CONSENSUS ZINC FINGER | FINGER, PROTEIN-DNA INTERACTION, |
| | | | | | | | | | PROTEIN; CHAIN: C, F, G;” | PROTEIN DESIGN, 2 CRYSTAL |
| | | | | | | | | | | STRUCTURE, COMPLEX (ZINC |
| | | | | | | | | | | FINGER/DNA)” |
| 456 | 1mey | C | 317 | 398 | 1.70E−50 | 0.64 | 1 | | “DNA; CHAIN: A, B, D, E; | “COMPLEX (ZINC FINGER/DNA) ZINC |
| | | | | | | | | | CONSENSUS ZINC FINGER | FINGER, PROTEIN-DNA INTERACTION, |
| | | | | | | | | | PROTEIN; CHAIN: C, F, G;” | PROTEIN DESIGN, 2 CRYSTAL |
| | | | | | | | | | | STRUCTURE, COMPLEX (ZINC |
| | | | | | | | | | | FINGER/DNA)” |
| 456 | 1mey | C | 205 | 286 | 6.80E−50 | 0.34 | 1 | | “DNA; CHAIN: A, B, D, E; | “COMPLEX (ZINC FINGER/DNA) ZINC |
| | | | | | | | | | CONSENSUS ZINC FINGER | FINGER, PROTEIN-DNA INTERACTION, |
| | | | | | | | | | PROTEIN; CHAIN: C, F, G;” | PROTEIN DESIGN, 2 CRYSTAL |
| | | | | | | | | | | STRUCTURE, COMPLEX (ZINC |
| | | | | | | | | | | FINGER/DNA)” |
| 456 | 1mey | C | 177 | 258 | 1.70E−49 | 0.59 | 1 | | “DNA; CHAIN: A, B, D, E; | “COMPLEX (ZINC FINGER/DNA) ZINC |
| | | | | | | | | | CONSENSUS ZINC FINGER | FINGER, PROTEIN-DNA INTERACTION, |
| | | | | | | | | | PROTEIN; CHAIN: C, F, G;” | PROTEIN DESIGN, 2 CRYSTAL |
| | | | | | | | | | | STRUCTURE, COMPLEX (ZINC |
| | | | | | | | | | | FINGER/DNA)” |
| 456 | 1mey | C | 149 | 230 | 1.50E−47 | 0.52 | 1 | | “DNA; CHAIN: A, B, D, E; | “COMPLEX (ZINC FINGER/DNA) ZINC |
| | | | | | | | | | CONSENSUS ZINC FINGER | FINGER, PROTEIN-DNA INTERACTION, |
| | | | | | | | | | PROTEIN; CHAIN: C, F, G;” | PROTEIN DESIGN, 2 CRYSTAL |
| | | | | | | | | | | STRUCTURE, COMPLEX (ZINC |
| | | | | | | | | | | FINGER/DNA)” |
| 456 | 1mey | C | 121 | 202 | 3.40E−46 | 0.11 | 0.92 | | “DNA; CHAIN: A, B, D, E; | “COMPLEX (ZINC FINGER/DNA) ZINC |
| | | | | | | | | | CONSENSUS ZINC FINGER | FINGER, PROTEIN-DNA INTERACTION, |
| | | | | | | | | | PROTEIN; CHAIN: C, F, G;” | PROTEIN DESIGN, 2 CRYSTAL |
| | | | | | | | | | | STRUCTURE, COMPLEX (ZINC |
| | | | | | | | | | | FINGER/DNA)” |
| 456 | 1mey | C | 373 | 429 | 1.00E−33 | 0.46 | 1 | | “DNA; CHAIN: A, B, D, E; | “COMPLEX (ZINC FINGER/DNA) ZINC |
| | | | | | | | | | CONSENSUS ZINC FINGER | FINGER, PROTEIN-DNA INTERACTION, |
| | | | | | | | | | PROTEIN; CHAIN: C, F, G;” | PROTEIN DESIGN, 2 CRYSTAL |
| | | | | | | | | | | STRUCTURE, COMPLEX (ZINC |
| | | | | | | | | | | FINGER/DNA)” |
| 456 | 1mey | G | 343 | 370 | 1.00E−12 | 0.27 | 0.99 | | “DNA; CHAIN: A, B, D, E; | “COMPLEX (ZINC FINGER/DNA) ZINC |
| | | | | | | | | | CONSENSUS ZINC FINGER | FINGER, PROTEIN-DNA INTERACTION, |
| | | | | | | | | | PROTEIN; CHAIN: C, F, G;” | PROTEIN DESIGN, 2 CRYSTAL |
| | | | | | | | | | | STRUCTURE, COMPLEX (ZINC |
| | | | | | | | | | | FINGER/DNA)” |
| 456 | 1mey | C | 317 | 399 | 1.00E−50 | | | 96.05 | “DNA; CHAIN: A, B, D, E; | “COMPLEX (ZINC FINGER/DNA) ZINC |
| | | | | | | | | | CONSENSUS ZINC FINGER | FINGER, PROTEIN-DNA INTERACTION, |
| | | | | | | | | | PROTEIN; CHAIN: C, F, G;” | PROTEIN DESIGN, 2 CRYSTAL |
| | | | | | | | | | | STRUCTURE, COMPLEX (ZINC |
| | | | | | | | | | | FINGER/DNA)” |
| 456 | 1tf3 | A | 122 | 198 | 1.70E−18 | 0.25 | −0.11 | | “TRANSCRIPTION FACTOR | “COMPLEX (TRANSCRIPTION |
| | | | | | | | | | IIIA; CHAIN: A; 5S RNA | REGULATION/DNA) TFIIIA; 5S GENE; |
| | | | | | | | | | GENE; CHAIN: E, F;” | NMR, TFIIIA, PROTEIN, DNA, |
| | | | | | | | | | | TRANSCRIPTION FACTOR, 5S RNA 2 |
| | | | | | | | | | | GENE, DNA BINDING PROTEIN, ZINC |
| | | | | | | | | | | FINGER, COMPLEX 3 (TRANSCRIPTION |
| | | | | | | | | | | REGULATION/DNA)” |
| 456 | 1tf6 | A | 178 | 323 | 3.40E−38 | 0.34 | 0.95 | | “TFIIIA; CHAIN: A, D; 5S | “COMPLEX (TRANSCRIPTION |
| | | | | | | | | | RIBOSOMAL RNA GENE; | REGULATION/DNA) COMPLEX |
| | | | | | | | | | CHAIN: B, C, E, F;” | (TRANSCRIPTION REGULATION/DNA), |
| | | | | | | | | | | RNA POLYMERASE III, 2 TRANSCRIPTION |
| | | | | | | | | | | INITIATION, ZINC FINGER PROTEIN” |
| 456 | 1tf6 | A | 290 | 428 | 1.20E−36 | −0.17 | 1 | | “TFIIIA; CHAIN: A, D; 5S | “COMPLEX (TRANSCRIPTION |
| | | | | | | | | | RIBOSOMAL RNA GENE; | REGULATION/DNA) COMPLEX |
| | | | | | | | | | CHAIN: B, C, E, F;” | (TRANSCRIPTION REGULATION/DNA), |
| | | | | | | | | | | RNA POLYMERASE III, 2 TRANSCRIPTION |
| | | | | | | | | | | INITIATION, ZINC FINGER PROTEIN” |
| 456 | 1tf6 | A | 122 | 267 | 5.10E−36 | 0.05 | 0.75 | | “TFIIIA; CHAIN: A, D; 5S | “COMPLEX (TRANSCRIPTION |
| | | | | | | | | | RIBOSOMAL RNA GENE; | REGULATION/DNA) COMPLEX |
| | | | | | | | | | CHAIN: B, C, E, F;” | (TRANSCRIPTION REGULATION/DNA), |
| | | | | | | | | | | RNA POLYMERASE III, 2 TRANSCRIPTION |
| | | | | | | | | | | INITIATION, ZINC FINGER PROTEIN” |
| 456 | 1tf6 | A | 233 | 398 | 3.40E−38 | | | 110.2 | “TFIIIA; CHAIN: A, D; 5S | “COMPLEX (TRANSCRIPTION |
| | | | | | | | | | RIBOSOMAL RNA GENE; | REGULATION/DNA) COMPLEX |
| | | | | | | | | | CHAIN: B, C, B, F;” | (TRANSCRIPTION REGULATION/DNA), |
| | | | | | | | | | | RNA POLYMERASE III, 2 TRANSCRIPTION |
| | | | | | | | | | | INITIATION, ZINC FINGER PROTEIN” |
| 456 | 1ubd | C | 154 | 258 | 2.10E−49 | 0.25 | 1 | | “YY1; CHAIN: C; ADENO- | “COMPLEX (TRANSCRIPTION |
| | | | | | | | | | ASSOCIATED VIRUS P5 | REGULATION/DNA) YING-YANG 1; |
| | | | | | | | | | INITIATOR ELEMENT DNA; | TRANSCRIPTION INITIATION, INITIATOR |
| | | | | | | | | | CHAIN; A, B;” | ELEMENT, YY1, ZINC 2 FINGER PROTEIN, |
| | | | | | | | | | | DNA-PROTEIN RECOGNITION, 3 |
| | | | | | | | | | | COMPLEX (TRANSCRIPTION |
| | | | | | | | | | | REGULATION/DNA)” |
| 456 | 1ubd | C | 315 | 426 | 6.30E−48 | 0.34 | 1 | | “YY1; CHAIN: C; ADENO- | “COMPLEX (TRANSCRIPTION |
| | | | | | | | | | ASSOCIATED VIRUS P5 | REGULATION/DNA) YING-YANG 1; |
| | | | | | | | | | INITIATOR ELEMENT DNA; | TRANSCRIPTION INITIATION, INITIATOR |
| | | | | | | | | | CHAIN: A, B;” | ELEMENT, YY1, ZINC 2 FINGER PROTEIN, |
| | | | | | | | | | | DNA-PROTEIN RECOGNITION, 3 |
| | | | | | | | | | | COMPLEX (TRANSCRIPTION |
| | | | | | | | | | | REGULATION/DNA)” |
| 456 | 1ubd | C | 294 | 398 | 1.70E−35 | 0.29 | 1 | | “YY1; CHAIN: C; ADENO- | “COMPLEX (TRANSCRIPTION |
| | | | | | | | | | ASSOCIATED VIRUS P5 | REGULATION/DNA) YING-YANG 1; |
| | | | | | | | | | INITIATOR ELEMENT DNA; | TRANSCRIPTION INITIATION, INITIATOR |
| | | | | | | | | | CHAIN: A, B;” | ELEMENT, YY1, ZINC 2 FINGER PROTEIN, |
| | | | | | | | | | | DNA-PROTEIN RECOGNITION, 3 |
| | | | | | | | | | | COMPLEX (TRANSCRIPTION |
| | | | | | | | | | | REGULATION/DNA)” |
| 456 | 1ubd | C | 325 | 426 | 8.50E−35 | 0.27 | 1 | | “YY1; CHAIN: C; ADENO- | “COMPLEX (TRANSCRIPTION |
| | | | | | | | | | ASSOCIATED VIRUS P5 | REGULATION/DNA) YING-YANG 1; |
| | | | | | | | | | INITIATOR ELEMENT DNA; | TRANSCRIPTION INITIATION, INITIATOR |
| | | | | | | | | | CHAIN: A, B;” | ELEMENT, YY1, ZINC 2 FINGER PROTEIN, |
| | | | | | | | | | | DNA-PROTEIN RECOGNITION, 3 |
| | | | | | | | | | | COMPLEX (TRANSCRIPTION |
| | | | | | | | | | | REGULATION/DNA)” |
| 456 | 1ubd | C | 115 | 202 | 5.10E−29 | −0.23 | 0.22 | | “YY1; CHAIN: C; ADENO- | “COMPLEX (TRANSCRIPTION |
| | | | | | | | | | ASSOCIATED VIRUS P5 | REGULATION/DNA) YING-YANG 1; |
| | | | | | | | | | INITIATOR ELEMENT DNA; | TRANSCRIPTION INITIATION, INITIATOR |
| | | | | | | | | | CHAIN: A, B;” | ELEMENT, YY1, ZINC 2 FINGER PROTEIN, |
| | | | | | | | | | | DNA-PROTEIN RECOGNITION, 3 |
| | | | | | | | | | | COMPLEX (TRANSCRIPTION |
| | | | | | | | | | | REGULATION/DNA)” |
| 456 | 1ubd | C | 317 | 427 | 6.30E−48 | | | 87.65 | “YY1; CHAIN: C; ADENO- | “COMPLEX (TRANSCRIPTION |
| | | | | | | | | | ASSOCIATED VIRUS P5 | REGULATION/DNA) YING-YANG 1; |
| | | | | | | | | | INITIATOR ELEMENT DNA; | TRANSCRIPTION INITIATION, INITIATOR |
| | | | | | | | | | CHAIN: A, B;” | ELEMENT, YY1, ZINC 2 FINGER PROTEIN, |
| | | | | | | | | | | DNA-PROTEIN RECOGNITION, 3 |
| | | | | | | | | | | COMPLEX (TRANSCRIPTION |
| | | | | | | | | | | REGULATION/DNA)” |
| 456 | 2gli | A | 233 | 400 | 4.20E−65 | 0.2 | 1 | | “ZINC FINGER PROTEIN | “COMPLEX (DNA-BINDING |
| | | | | | | | | | GLI1; CHAIN: A; DNA; | PROTEIN/DNA) FIVE-FINGER GLI; GLI, |
| | | | | | | | | | CHAIN: C, D;” | ZINC FTNGER, COMPLEX (DNA-BINDING |
| | | | | | | | | | | PROTEIN/DNA)” |
| 456 | 2gli | A | 205 | 372 | 2.10E−63 | 0.16 | 1 | | “ZINC FINGER PROTEIN | “COMPLEX (DNA-BINDING |
| | | | | | | | | | GLI1; CHAIN: A; DNA; | PROTEIN/DNA) FIVE-FINGER GLI; GLI, |
| | | | | | | | | | CHAIN: C, D;” | ZINC FINGER, COMPLEX (DNA-BINDING |
| | | | | | | | | | | PROTEIN/DNA)” |
| 456 | 2gli | A | 177 | 344 | 1.90E−62 | 0 | 0.88 | | “ZINC FINGER PROTEIN | “COMPLEX (DNA-BINDING |
| | | | | | | | | | GLI1; CHAIN: A; DNA; | PROTEIN/DNA) FIVE-FINGER GLI; GLI, |
| | | | | | | | | | CHAIN: C, D;” | ZINC FINGER, COMPLEX (DNA-BINDING |
| | | | | | | | | | | PROTEIN/DNA)” |
| 456 | 2gli | A | 153 | 288 | 2.10E−60 | 0 | 0.93 | | “ZINC FINGER PROTEIN | “COMPLEX (DNA-BINDING |
| | | | | | | | | | GLI1; CHAIN: A; DNA; | PROTEIN/DNA) FIVE-FINGER GLI; GLI, |
| | | | | | | | | | CHAIN: C, D;” | ZINC FINGER, COMPLEX (DNA-BINDING |
| | | | | | | | | | | PROTEIN/DNA)” |
| 456 | 2gli | A | 317 | 426 | 1.30E−46 | 0.05 | 0.93 | | “ZINC FINGER PROTEIN | “COMPLEX (DNA-BINDING |
| | | | | | | | | | GLI1; CHAIN: A; DNA; | PROTEIN/DNA) FIVE-FINGER GLI; GLI, |
| | | | | | | | | | CHAIN: C, D;” | ZINC FINGER, COMPLEX (DNA-BINDING |
| | | | | | | | | | | PROTEIN/DNA)” |
| 456 | 2gli | A | 297 | 425 | 1.70E−34 | 0.52 | 1 | | “ZINC FINGER PROTEIN | “COMPLEX (DNA-BINDING |
| | | | | | | | | | GLI1; CHAIN: A; DNA; | PROTEIN/DNA) FIVE-FINGER GLI; GLI, |
| | | | | | | | | | CHAIN: C, D;” | ZINC FINGER, COMPLEX (DNA-BINDING |
| | | | | | | | | | | PROTEIN/DNA)” |
| 456 | 2gli | A | 261 | 400 | 4.20E−65 | | | 95.99 | “ZINC FINGER PROTEIN | “COMPLEX (DNA-BINDING |
| | | | | | | | | | GLI1; CHAIN: A; DNA; | PROTEIN/DNA) FIVE-FINGER GLI; GLI, |
| | | | | | | | | | CHAIN: C, D;” | ZINC FINGER, COMPLEX (DNA-BINDING |
| | | | | | | | | | | PROTEIN/DNA)” |
| 458 | 1tub | A | 10 | 94 | 1.40E−40 | −0.25 | 0.46 | | “TUBULIN; CHAIN: A, B;” | “MICROTUBULES MICROTUBULES, |
| | | | | | | | | | | ALPHA-TUBULIN, BETA-TUBULIN, |
| | | | | | | | | | | GTPASE HELIX” |
| 462 | 1tub | A | 17 | 82 | 5.10E−31 | −0.43 | 0.21 | | “TUBULIN; CHAIN: A, B;” | “MICROTUBULES MICROTUBULES, |
| | | | | | | | | | | ALPHA-TUBULIN, BETA-TUBULIN, |
| | | | | | | | | | | GTPASE HELIX” |
| 463 | 1alh | A | 514 | 595 | 1.30E−42 | 0.01 | 1 | | “QGSR ZINC FINGER | “COMPLEX (ZINC FINGER/DNA) |
| | | | | | | | | | PEPTIDE; CHAIN: A; | COMPLEX (ZINC FINGER/DNA), ZINC |
| | | | | | | | | | DUPLEX | FINGER, DNA-BINDING PROTEIN” |
| | | | | | | | | | OLIGONUCLEOTIDE | |
| | | | | | | | | | BINDING SITE; CHAIN: B, | |
| | | | | | | | | | C;” | |
| 463 | 1alh | A | 290 | 370 | 1.70E−24 | 0.14 | 1 | | “QGSR ZINC FINGER | “COMPLEX (ZINC FINGER/DNA) |
| | | | | | | | | | PEPTIDE; CHAIN: A; | COMPLEX (ZINC FINGER/DNA), ZINC |
| | | | | | | | | | DUPLEX | FINGER, DNA-BINDING PROTEIN” |
| | | | | | | | | | OLIGONUCLEOTIDE | |
| | | | | | | | | | BINDING SITE; CHAIN: B, | |
| | | | | | | | | | C;” | |
| 463 | 1mey | C | 625 | 706 | 5.10E−51 | 0.53 | 1 | | “DNA; CHAIN: A, B, D, E; | “COMPLEX (ZINC FINGER/DNA) ZINC |
| | | | | | | | | | CONSENSUS ZINC FINGER | FINGER, PROTEIN-DNA INTERACTION, |
| | | | | | | | | | PROTEIN; CHAIN: C, F, G;” | PROTEIN DESIGN, 2 CRYSTAL |
| | | | | | | | | | | STRUCTURE, COMPLEX (ZINC |
| | | | | | | | | | | FINGER/DNA)” |
| 463 | 1mey | C | 597 | 678 | 6.80E−51 | 0.46 | 1 | | “DNA; CHAIN: A, B, D, E; | “COMPLEX (ZINC FINGER/DNA) ZINC |
| | | | | | | | | | CONSENSUS ZINC FINGER | FINGER, PROTEIN-DNA INTERACTION, |
| | | | | | | | | | PROTEIN; CHAIN: C, F, G;” | PROTEIN DESIGN, 2 CRYSTAL |
| | | | | | | | | | | STRUCTURE, COMPLEX (ZINC |
| | | | | | | | | | | FINGER/DNA)” |
| 463 | 1mey | C | 569 | 650 | 1.20E−50 | 0.41 | 1 | | “DNA; CHAIN: A, B, D, E; | “COMPLEX (ZINC FINGER/DNA) ZINC |
| | | | | | | | | | CONSENSUS ZINC FINGER | FINGER, PROTEIN-DNA INTERACTION, |
| | | | | | | | | | PROTEIN; CHAIN: C, F, G;” | PROTEIN DESIGN, 2 CRYSTAL |
| | | | | | | | | | | STRUCTURE, COMPLEX (ZINC |
| | | | | | | | | | | FINGER/DNA)” |
| 463 | 1mey | C | 541 | 622 | 1.50E−50 | 0.03 | 1 | | “DNA; CHAIN: A, B, D, E; | “COMPLEX (ZINC FINGER/DNA) ZINC |
| | | | | | | | | | CONSENSUS ZINC FINGER | FINGER, PROTEIN-DNA INTERACTION, |
| | | | | | | | | | PROTEIN; CHAIN: C, F, G;” | PROTEIN DESIGN, 2 CRYSTAL |
| | | | | | | | | | | STRUCTURE, COMPLEX (ZINC |
| | | | | | | | | | | FINGER/DNA)” |
| 463 | 1mey | C | 653 | 734 | 1.50E−50 | 0.47 | 1 | | “DNA; CHAIN: A, B, D, E; | “COMPLEX (ZINC FINGER/DNA) ZINC |
| | | | | | | | | | CONSENSUS ZINC FINGER | FINGER, PROTEIN-DNA INTERACTION, |
| | | | | | | | | | PROTEIN; CHAIN: C, F, G;” | PROTEIN DESIGN, 2 CRYSTAL |
| | | | | | | | | | | STRUCTURE, COMPLEX (ZINC |
| | | | | | | | | | | FINGER/DNA)” |
| 463 | 1mey | C | 681 | 762 | 5.10E−50 | 0.27 | 1 | | “DNA; CHAIN: A, B, D, E; | “COMPLEX (ZINC FINGER/DNA) ZINC |
| | | | | | | | | | CONSENSUS ZINC FINGER | FINGER, PROTEIN-DNA INTERACTION, |
| | | | | | | | | | PROTEIN; CHAIN: C, F, G;” | PROTEIN DESIGN, 2 CRYSTAL |
| | | | | | | | | | | STRUCTURE, COMPLEX (ZINC |
| | | | | | | | | | | FINGER/DNA)” |
| 463 | 1mey | C | 709 | 790 | 1.70E−49 | 0.14 | 1 | | “DNA; CHAIN: A, B, D, E; | “COMPLEX (ZINC FINGER/DNA) ZINC |
| | | | | | | | | | CONSENSUS ZINC FINGER | FINGER, PROTEIN-DNA INTERACTION, |
| | | | | | | | | | PROTEIN; CHAIN: C, F, G;” | PROTEIN DESIGN, 2 CRYSTAL |
| | | | | | | | | | | STRUCTURE, COMPLEX (ZINC |
| | | | | | | | | | | FINGER/DNA)” |
| 463 | 1mey | C | 513 | 594 | 3.40E−49 | 0.22 | 1 | | “DNA; CHAIN: A, B, D, E; | “COMPLEX (ZINC FINGER/DNA) ZINC |
| | | | | | | | | | CONSENSUS ZINC FINGER | FINGER, PROTEIN-DNA INTERACTION, |
| | | | | | | | | | PROTEIN; CHAIN: C, F, G;” | PROTEIN DESIGN, 2 CRYSTAL |
| | | | | | | | | | | STRUCTURE, COMPLEX (ZINC |
| | | | | | | | | | | FINGER/DNA)” |
| 463 | 1mey | C | 485 | 566 | 5.10E−49 | 0.36 | 1 | | “DNA; CHAIN: A, B, D, E; | “COMPLEX (ZINC FINGER/DNA) ZINC |
| | | | | | | | | | CONSENSUS ZINC FINGER | FINGER, PROTEIN-DNA INTERACTION, |
| | | | | | | | | | PROTEIN; CHAIN: C, F, G;” | PROTEIN DESIGN, 2 CRYSTAL |
| | | | | | | | | | | STRUCTURE, COMPLEX (ZINC |
| | | | | | | | | | | FINGER/DNA)” |
| 463 | 1mey | C | 457 | 538 | 1.20E−47 | 0.06 | 1 | | “DNA; CHAIN: A, B, D, E; | “COMPLEX (ZINC FINGER/DNA) ZINC |
| | | | | | | | | | CONSENSUS ZINC FINGER | FINGER, PROTEIN-DNA INTERACTION, |
| | | | | | | | | | PROTEIN; CHAIN: C, F, G;” | PROTEIN DESIGN, 2 CRYSTAL |
| | | | | | | | | | | STRUCTURE, COMPLEX (ZINC |
| | | | | | | | | | | FINGER/DNA)” |
| 463 | 1mey | C | 429 | 510 | 8.50E−47 | 0.35 | 1 | | “DNA; CHAIN: A, B, D, E; | “COMPLEX (ZINC FINGER/DNA) ZINC |
| | | | | | | | | | CONSENSUS ZINC FINGER | FINGER, PROTEIN-DNA INTERACTION, |
| | | | | | | | | | PROTEIN; CHAIN: C, F, G;” | PROTEIN DESIGN, 2 CRYSTAL |
| | | | | | | | | | | STRUCTURE, COMPLEX (ZINC |
| | | | | | | | | | | FINGER/DNA)” |
| 463 | 1mey | C | 401 | 482 | 3.40E−46 | −0.06 | 1 | | “DNA; CHAIN: A, B, D, E; | “COMPLEX (ZINC FINGER/DNA) ZINC |
| | | | | | | | | | CONSENSUS ZINC FINGER | FINGER, PROTEIN-DNA INTERACTION, |
| | | | | | | | | | PROTEIN; CHAIN: C, F, G;” | PROTEIN DESIGN, 2 CRYSTAL |
| | | | | | | | | | | STRUCTURE, COMPLEX (ZINC |
| | | | | | | | | | | FINGER/DNA)” |
| 463 | 1mey | C | 373 | 454 | 8.50E−46 | 0.33 | 1 | | “DNA; CHAIN: A, B, D, E; | “COMPLEX (ZINC FINGER/DNA) ZINC |
| | | | | | | | | | CONSENSUS ZINC FINGER | FINGER, PROTEIN-DNA INTERACTION, |
| | | | | | | | | | PROTEIN; CHAIN: C, F, G;” | PROTEIN DESIGN, 2 CRYSTAL |
| | | | | | | | | | | STRUCTURE, COMPLEX (ZINC |
| | | | | | | | | | | FINGER/DNA)” |
| 463 | 1mey | C | 184 | 265 | 1.00E−44 | −0.29 | 0.24 | | “DNA; CHAIN: A, B, D, E; | “COMPLEX (ZINC FINGER/DNA) ZINC |
| | | | | | | | | | CONSENSUS ZINC FINGER | FINGER, PROTEIN-DNA INTERACTION, |
| | | | | | | | | | PROTEIN; CHAIN: C, F, G;” | PROTEIN DESIGN, 2 CRYSTAL |
| | | | | | | | | | | STRUCTURE, COMPLEX (ZINC |
| | | | | | | | | | | FINGER/DNA)” |
| 463 | 1mey | C | 345 | 426 | 1.70E−44 | 0.22 | 1 | | “DNA; CHAIN: A, B, D, E; | “COMPLEX (ZINC FINGER/DNA) ZINC |
| | | | | | | | | | CONSENSUS ZINC FINGER | FINGER, PROTEIN-DNA INTERACTION, |
| | | | | | | | | | PROTEIN; CHAIN: C, F, G;” | PROTEIN DESIGN, 2 CRYSTAL |
| | | | | | | | | | | STRUCTURE, COMPLEX (ZINC |
| | | | | | | | | | | FINGER/DNA)” |
| 463 | 1mey | C | 737 | 814 | 6.80E−43 | 0.03 | 0.57 | | “DNA; CHAIN: A, B, D, E; | “COMPLEX (ZINC FINGER/DNA) ZINC |
| | | | | | | | | | CONSENSUS ZINC FINGER | FINGER, PROTEIN-DNA INTERACTION, |
| | | | | | | | | | PROTEIN; CHAIN: C, F, G;” | PROTEIN DESIGN, 2 CRYSTAL |
| | | | | | | | | | | STRUCTURE, COMPLEX (ZINC |
| | | | | | | | | | | FINGER/DNA)” |
| 463 | 1mey | C | 317 | 398 | 1.40E−42 | 0.29 | 1 | | “DNA; CHAIN: A, B, D, E; | “COMPLEX (ZINC FINGER/DNA) ZINC |
| | | | | | | | | | CONSENSUS ZINC FINGER | FINGER, PROTEIN-DNA INTERACTION, |
| | | | | | | | | | PROTEIN; CHAIN: C, F, G;” | PROTEIN DESIGN, 2 CRYSTAL |
| | | | | | | | | | | STRUCTURE, COMPLEX (ZINC |
| | | | | | | | | | | FINGER/DNA)” |
| 463 | 1mey | C | 289 | 370 | 1.20E−41 | 0.47 | 1 | | “DNA; CHAIN: A, B, D, E; | “COMPLEX (ZINC FINGER/DNA) ZINC |
| | | | | | | | | | CONSENSUS ZINC FINGER | FINGER, PROTEIN-DNA INTERACTION, |
| | | | | | | | | | PROTEIN; CHAIN: C, F, G;” | PROTEIN DESIGN, 2 CRYSTAL |
| | | | | | | | | | | STRUCTURE, COMPLEX (ZINC |
| | | | | | | | | | | FINGER/DNA)” |
| 463 | 1mey | C | 163 | 237 | 3.40E−40 | −0.27 | 0.27 | | “DNA; CHAIN: A, B, D, E; | “COMPLEX (ZINC FINGER/DNA) ZINC |
| | | | | | | | | | CONSENSUS ZINC FINGER | FINGER, PROTEIN-DNA INTERACTION, |
| | | | | | | | | | PROTEIN; CHAIN: C, F, G;” | PROTEIN DESIGN, 2 CRYSTAL |
| | | | | | | | | | | STRUCTURE, COMPLEX (ZINC |
| | | | | | | | | | | FINGER/DNA)” |
| 463 | 1mey | C | 212 | 286 | 3.40E−36 | −0.58 | 0.24 | | “DNA; CHAIN: A, B, D, E; | “COMPLEX (ZINC FINGER/DNA) ZINC |
| | | | | | | | | | CONSENSUS ZINC FINGER | FINGER, PROTEIN-DNA INTERACTION, |
| | | | | | | | | | PROTEIN; CHAIN: C, F, G;” | PROTEIN DESIGN, 2 CRYSTAL |
| | | | | | | | | | | STRUCTURE, COMPLEX (ZINC |
| | | | | | | | | | | FINGER/DNA)” |
| 463 | 1mey | C | 268 | 342 | 1.50E−35 | −0.29 | 0.88 | | “DNA; CHAIN: A, B, D, E; | “COMPLEX (ZINC FINGER/DNA) ZINC |
| | | | | | | | | | CONSENSUS ZINC FINGER | FINGER, PROTEIN-DNA INTERACTION, |
| | | | | | | | | | PROTEIN; CHAIN: C, F, G;” | PROTEIN DESIGN, 2 CRYSTAL |
| | | | | | | | | | | STRUCTURE, COMPLEX (ZINC |
| | | | | | | | | | | FINGER/DNA)” |
| 463 | 1mey | G | 182 | 209 | 1.70E−11 | −0.42 | 0.21 | | “DNA; CHAIN: A, B, D, E; | “COMPLEX (ZINC FINGER/DNA) ZINC |
| | | | | | | | | | CONSENSUS ZINC FINGER | FINGER, PROTEIN-DNA INTERACTION, |
| | | | | | | | | | PROTEIN; CHAIN: C, F, G;” | PROTEIN DESIGN, 2 CRYSTAL |
| | | | | | | | | | | STRUCTURE, COMPLEX (ZINC |
| | | | | | | | | | | FINGER/DNA)” |
| 463 | 1mey | G | 238 | 265 | 1.70E−10 | 0.12 | 0.1 | | “DNA; CHAIN: A, B, D, E; | “COMPLEX (ZINC FINGER/DNA) ZINC |
| | | | | | | | | | CONSENSUS ZINC FINGER | FINGER, PROTEIN-DNA INTERACTION, |
| | | | | | | | | | PROTEIN; CHAIN: C, F, G;” | PROTEIN DESIGN, 2 CRYSTAL |
| | | | | | | | | | | STRUCTURE, COMPLEX (ZINC |
| | | | | | | | | | | FINGER/DNA)” |
| 463 | 1mey | C | 681 | 763 | 1.50E−50 | | | 100.44 | “DNA; CHAIN: A, B, D, E; | “COMPLEX (ZINC FINGER/DNA) ZINC |
| | | | | | | | | | CONSENSUS ZINC FINGER | FINGER, PROTEIN-DNA INTERACTION, |
| | | | | | | | | | PROTEIN; CHAIN: C, F, G;” | PROTEIN DESIGN, 2 CRYSTAL |
| | | | | | | | | | | STRUCTURE, COMPLEX (ZINC |
| | | | | | | | | | | FINGER/DNA)” |
| 463 | 1tf3 | A | 290 | 370 | 3.40E−17 | 0.42 | 0.94 | | “TRANSCRIPTION FACTOR | “COMPLEX (TRANSCRIPTION |
| | | | | | | | | | IIIA; CHAIN: A; 5S RNA | REGULATION/DNA) TFIIIA; 5S GENE; |
| | | | | | | | | | GENE; CHAIN: E, F;” | NMR, TFIIIA, PROTEIN, DNA, |
| | | | | | | | | | | TRANSCRIPTION FACTOR, 5S RNA 2 |
| | | | | | | | | | | GENE, DNA BINDING PROTEIN, ZINC |
| | | | | | | | | | | FINGER, COMPLEX 3 (TRANSCRIPTION |
| | | | | | | | | | | REGULATION/DNA)” |
| 463 | 1tf6 | A | 598 | 743 | 3.40E−38 | 0.32 | 0.99 | | “TFIIIA; CHAIN: A, D; 5S | “COMPLEX (TRANSCRIPTION |
| | | | | | | | | | RIBOSOMAL RNA GENE; | REGULATION/DNA) COMPLEX |
| | | | | | | | | | CHAIN: B, C, E, F;” | (TRANSCRIPTION REGULATION/DNA), |
| | | | | | | | | | | RNA POLYMERASE III, 2 TRANSCRIPTION |
| | | | | | | | | | | INITIATION, ZINC FINGER PROTEIN” |
| 463 | 1tf6 | A | 654 | 799 | 1.40E−36 | 0.09 | 1 | | “TFIIIA; CHAIN: A, D; 5S | “COMPLEX (TRANSCRIPTION |
| | | | | | | | | | RIBOSOMAL RNA GENE; | REGULATION/DNA) COMPLEX |
| | | | | | | | | | CHAIN: B, C, E, F;” | (TRANSCRIPTION REGULATION/DNA), |
| | | | | | | | | | | RNA POLYMERASE III, 2 TRANSCRIPTION |
| | | | | | | | | | | INITIATION, ZINC FINGER PROTEIN” |
| 463 | 1tf6 | A | 458 | 603 | 1.70E−36 | −0.07 | 1 | | “TFIIIA; CHAIN: A, D; 5S | “COMPLEX (TRANSCRIPTION |
| | | | | | | | | | RIBOSOMAL RNA GENE; | REGULATION/DNA) COMPLEX |
| | | | | | | | | | CHAIN: B, C, E, F;” | (TRANSCRIPTION REGULATION/DNA), |
| | | | | | | | | | | RNA POLYMERASE III, 2 TRANSCRIPTION |
| | | | | | | | | | | INITIATION, ZINC FINGER PROTEIN” |
| 463 | 1tf6 | A | 346 | 491 | 1.70E−34 | −0.21 | 1 | | “TFIIIA; CHAIN: A, D; 5S | “COMPLEX (TRANSCRIPTION |
| | | | | | | | | | RIBOSOMAL RNA GENE; | REGULATION/DNA) COMPLEX |
| | | | | | | | | | CHAIN: B, C, E, F;” | (TRANSCRIPTION REGULATION/DNA), |
| | | | | | | | | | | RNA POLYMERASE III, 2 TRANSCRIPTION |
| | | | | | | | | | | INITIATION, ZINC FINGER PROTEIN” |
| 463 | 1tf6 | A | 290 | 435 | 3.40E−34 | 0.17 | 1 | | “TFIIIA; CHAIN: A, D; 5S | “COMPLEX (TRANSCRIPTION |
| | | | | | | | | | RIBOSOMAL RNA GENE; | REGULATION/DNA) COMPLEX |
| | | | | | | | | | CHAIN: B, C, E, F;” | (TRANSCRIPTION REGULATION/DNA), |
| | | | | | | | | | | RNA POLYMERASE III, 2 TRANSCRIPTION |
| | | | | | | | | | | INITIATION, ZINC FINGER PROTEIN” |
| 463 | 1tf6 | A | 682 | 813 | 3.40E−32 | −0.05 | 0.99 | | “TFIIIA; CHAIN: A, D; 5S | “COMPLEX (TRANSCRIPTION |
| | | | | | | | | | RIBOSOMAL RNA GENE; | REGULATION/DNA) COMPLEX |
| | | | | | | | | | CHAIN: B, C, E, F;” | (TRANSCRIPTION REGULATION/DNA), |
| | | | | | | | | | | RNA POLYMERASE III, 2 TRANSCRIPTION |
| | | | | | | | | | | INITIATION, ZINC FINGER PROTEIN” |
| 463 | 1tf6 | A | 569 | 731 | 3.40E−38 | | | 101.86 | “TFIIIA; CHAIN: A, D; 5S | “COMPLEX (TRANSCRIPTION |
| | | | | | | | | | RIBOSOMAL RNA GENE; | REGULATION/DNA) COMPLEX |
| | | | | | | | | | CHAIN: B, C, E, F;” | (TRANSCRIPTION REGULATION/DNA), |
| | | | | | | | | | | RNA POLYMERASE III, 2 TRANSCRIPTION |
| | | | | | | | | | | INITIATION, ZINC FINGER PROTEIN” |
| 463 | 1ubd | C | 651 | 762 | 1.00E−57 | 0.23 | 1 | | “YY1; CHAIN: C; ADENO- | “COMPLEX (TRANSCRIPTION |
| | | | | | | | | | ASSOCIATED VIRUS P5 | REGULATION/DNA) YING-YANG 1; |
| | | | | | | | | | INITIATOR ELEMENT DNA; | TRANSCRIPTION INITIATION, INITIATOR |
| | | | | | | | | | CHAIN: A, B;” | ELEMENT, YY1, ZINC 2 FINGER PROTEIN, |
| | | | | | | | | | | DNA-PROTEIN RECOGNITION, 3 |
| | | | | | | | | | | COMPLEX (TRANSCRIPTION |
| | | | | | | | | | | REGULATION/DNA)” |
| 463 | 1ubd | C | 511 | 622 | 2.10E−55 | 0.01 | 1 | | “YY1; CHAIN: C; ADENO- | “COMPLEX (TRANSCRIPTION |
| | | | | | | | | | ASSOCIATED VIRUS P5 | REGULATION/DNA) YING-YANG 1; |
| | | | | | | | | | INITIATOR ELEMENT DNA; | TRANSCRIPTION INITIATION, INITIATOR |
| | | | | | | | | | CHAIN: A, B;” | ELEMENT, YY1, ZINC 2 FINGER PROTEIN, |
| | | | | | | | | | | DNA-PROTEIN RECOGNITION, 3 |
| | | | | | | | | | | COMPLEX (TRANSCRIPTION |
| | | | | | | | | | | REGULATION/DNA)” |
| 463 | 1ubd | C | 567 | 706 | 6.30E−55 | −0.08 | 1 | | “YY1; CHAIN: C; ADENO- | “COMPLEX (TRANSCRIPTION |
| | | | | | | | | | ASSOCIATED VIRUS P5 | REGULATION/DNA) YING-YANG 1; |
| | | | | | | | | | INITIATOR ELEMENT DNA; | TRANSCRIPTION INITIATION, INITIATOR |
| | | | | | | | | | CHAIN: A, B;” | ELEMENT, YY1, ZINC 2 FINGER PROTEIN, |
| | | | | | | | | | | DNA-PROTEIN RECOGNITION, 3 |
| | | | | | | | | | | COMPLEX (TRANSCRIPTION |
| | | | | | | | | | | REGULATION/DNA)” |
| 463 | 1ubd | C | 343 | 454 | 1.10E−53 | 0.36 | 1 | | “YY1; CHAIN: C; ADENO- | “COMPLEX (TRANSCRIPTION |
| | | | | | | | | | ASSOCIATED VIRUS P5 | REGULATION/DNA) YING-YANG 1; |
| | | | | | | | | | INITIATOR ELEMENT DNA; | TRANSCRIPTION INITIATION, INITIATOR |
| | | | | | | | | | CHAIN: A, B;” | ELEMENT, YY1, ZINC 2 FINGER PROTEIN, |
| | | | | | | | | | | DNA-PROTEIN RECOGNITION, 3 |
| | | | | | | | | | | COMPLEX (TRANSCRIPTION |
| | | | | | | | | | | REGULATION/DNA)” |
| 463 | 1ubd | C | 427 | 538 | 1.50E−53 | −0.09 | 1 | | “YY1; CHAIN: C; ADENO- | “COMPLEX (TRANSCRIPTION |
| | | | | | | | | | ASSOCIATED VIRUS P5 | REGULATION/DNA) YING-YANG 1; |
| | | | | | | | | | INITIATOR ELEMENT DNA; | TRANSCRIPTION INITIATION, INITIATOR |
| | | | | | | | | | CHAIN: A, B;” | ELEMENT, YY1, ZINC 2 FINGER PROTEIN, |
| | | | | | | | | | | DNA-PROTEIN RECOGNITION, 3 |
| | | | | | | | | | | COMPLEX (TRANSCRIPTION |
| | | | | | | | | | | REGULATION/DNA)” |
| 463 | 1ubd | C | 294 | 398 | 6.30E−45 | −0.2 | 0.82 | | “YY1; CHAIN: C; ADENO- | “COMPLEX (TRANSCRIPTION |
| | | | | | | | | | ASSOCIATED VIRUS P5 | REGULATION/DNA) YING-YANG 1; |
| | | | | | | | | | INITIATOR ELEMENT DNA; | TRANSCRIPTION INITIATION, INITIATOR |
| | | | | | | | | | CHAIN: A, B;” | ELEMENT, YY1, ZINC 2 FINGER PROTEIN, |
| | | | | | | | | | | DNA-PROTEIN RECOGNITION, 3 |
| | | | | | | | | | | COMPLEX (TRANSCRIPTION |
| | | | | | | | | | | REGULATION/DNA)” |
| 463 | 1ubd | C | 521 | 622 | 1.50E−35 | −0.01 | 1 | | “YY1; CHAIN: C; ADENO- | “COMPLEX (TRANSCRIPTION |
| | | | | | | | | | ASSOCIATED VIRUS P5 | REGULATION/DNA) YING-YANG 1; |
| | | | | | | | | | INITIATOR ELEMENT DNA; | TRANSCRIPTION INITIATION, INITIATOR |
| | | | | | | | | | CHAIN: A, B;” | ELEMENT, YY1, ZINC 2 FINGER PROTEIN, |
| | | | | | | | | | | DNA-PROTEIN RECOGNITION, 3 |
| | | | | | | | | | | COMPLEX (TRANSCRIPTION |
| | | | | | | | | | | REGULATION/DNA)” |
| 463 | 1ubd | C | 493 | 594 | 1.00E−34 | 0.29 | 1 | | “YY1; CHAIN: C; ADENO- | “COMPLEX (TRANSCRIPTION |
| | | | | | | | | | ASSOCIATED VIRUS P5 | REGULATION/DNA) YING-YANG 1; |
| | | | | | | | | | INITIATOR ELEMENT DNA; | TRANSCRIPTION INITIATION, INITIATOR |
| | | | | | | | | | CHAIN: A, B;” | ELEMENT, YY1, ZINC 2 FINGER PROTEIN, |
| | | | | | | | | | | DNA-PROTEIN RECOGNITION, 3 |
| | | | | | | | | | | COMPLEX (TRANSCRIPTION |
| | | | | | | | | | | REGULATION/DNA)” |
| 463 | 1ubd | C | 661 | 762 | 3.40E−34 | 0.23 | 1 | | “YY1; CHAIN: C; ADENO- | “COMPLEX (TRANSCRIPTION |
| | | | | | | | | | ASSOCIATED VIRUS P5 | REGULATION/DNA) YING-YANG 1; |
| | | | | | | | | | INITIATOR ELEMENT DNA; | TRANSCRIPTION INITIATION, INITIATOR |
| | | | | | | | | | CHAIN: A, B;” | ELEMENT, YY1, ZINC 2 FINGER PROTEIN, |
| | | | | | | | | | | DNA-PROTEIN RECOGNITION, 3 |
| | | | | | | | | | | COMPLEX (TRANSCRIPTION |
| | | | | | | | | | | REGULATION/DNA)” |
| 463 | 1ubd | C | 686 | 790 | 1.50E−33 | 0.2 | 1 | | “YY1; CHAIN: C; ADENO- | “COMPLEX (TRANSCRIPTION |
| | | | | | | | | | ASSOCIATED VIRUS P5 | REGULATION/DNA) YING-YANG 1; |
| | | | | | | | | | INITIATOR ELEMENT DNA; | TRANSCRIPTION INITIATION, INITIATOR |
| | | | | | | | | | CHAIN: A, B;” | ELEMENT, YY1, ZINC 2 FINGER PROTEIN, |
| | | | | | | | | | | DNA-PROTEIN RECOGNITION, 3 |
| | | | | | | | | | | COMPLEX (TRANSCRIPTION |
| | | | | | | | | | | REGULATION/DNA)” |
| 463 | 1ubd | C | 465 | 566 | 1.70E−32 | 0.11 | 1 | | “YY1; CHAIN: C; ADENO- | “COMPLEX (TRANSCRIPTION |
| | | | | | | | | | ASSOCIATED VIRUS P5 | REGULATION/DNA) YING-YANG 1; |
| | | | | | | | | | INITIATOR ELEMENT DNA; | TRANSCRIPTION INITIATION, INITIATOR |
| | | | | | | | | | CHAIN: A, B;” | ELEMENT, YY1, ZINC 2 FINGER PROTEIN, |
| | | | | | | | | | | DNA-PROTEIN RECOGNITION, 3 |
| | | | | | | | | | | COMPLEX (TRANSCRIPTION |
| | | | | | | | | | | REGULATION/DNA)” |
| 463 | 1ubd | C | 717 | 815 | 8.50E−32 | −0.41 | 0.45 | | “YY1; CHAIN: C; ADENO- | “COMPLEX (TRANSCRIPTION |
| | | | | | | | | | ASSOCIATED VIRUS P5 | REGULATION/DNA) YING-YANG 1; |
| | | | | | | | | | INITIATOR ELEMENT DNA; | TRANSCRIPTION INITIATION, INITIATOR |
| | | | | | | | | | CHAIN: A, B;” | ELEMENT, YY1, ZINC 2 FINGER PROTEIN, |
| | | | | | | | | | | DNA-PROTEIN RECOGNITION, 3 |
| | | | | | | | | | | COMPLEX (TRANSCRIPTION |
| | | | | | | | | | | REGULATION/DNA)” |
| 463 | 1ubd | C | 353 | 454 | 1.70E−30 | 0.11 | 1 | | “YY1; CHAIN: C; ADENO- | “COMPLEX (TRANSCRIPTION |
| | | | | | | | | | ASSOCIATED VIRUS P5 | REGULATION/DNA) YING-YANG 1; |
| | | | | | | | | | INITIATOR ELEMENT DNA; | TRANSCRIPTION INITIATION, INITIATOR |
| | | | | | | | | | CHAIN: A, B;” | ELEMENT, YY1, ZINC 2 FINGER PROTEIN, |
| | | | | | | | | | | DNA-PROTEIN RECOGNITION, 3 |
| | | | | | | | | | | COMPLEX (TRANSCRIPTION |
| | | | | | | | | | | REGULATION/DNA)” |
| 463 | 1ubd | C | 165 | 265 | 1.00E−27 | −0.45 | 0.01 | | “YY1; CHAIN: C; ADENO- | “COMPLEX (TRANSCRIPTION |
| | | | | | | | | | ASSOCIATED VIRUS P5 | REGULATION/DNA) YING-YANG 1; |
| | | | | | | | | | INITIATOR ELEMENT DNA; | TRANSCRIPTION INITIATION, INITIATOR |
| | | | | | | | | | CHAIN: A, B;” | ELEMENT, YY1, ZINC 2 FINGER PROTEIN, |
| | | | | | | | | | | DNA-PROTEIN RECOGNITION, 3 |
| | | | | | | | | | | COMPLEX (TRANSCRIPTION |
| | | | | | | | | | | REGULATION/DNA)” |
| 463 | 1ubd | C | 270 | 370 | 1.00E−25 | −0.03 | 0.75 | | “YY1; CHAIN: C; ADENO- | “COMPLEX (TRANSCRIPTION |
| | | | | | | | | | ASSOCIATED VIRUS P5 | REGULATION/DNA) YING-YANG 1; |
| | | | | | | | | | INITIATOR ELEMENT DNA; | TRANSCRIPTION INITIATION, INITIATOR |
| | | | | | | | | | CHAIN: A, B;” | ELEMENT, YY1, ZINC 2 FINGER PROTEIN, |
| | | | | | | | | | | DNA-PROTEIN RECOGNITION, 3 |
| | | | | | | | | | | COMPLEX (TRANSCRIPTION |
| | | | | | | | | | | REGULATION/DNA)” |
| 463 | 1ubd | C | 243 | 342 | 6.80E−24 | −0.51 | 0.05 | | “YY1; CHAIN: C; ADENO- | “COMPLEX (TRANSCRIPTION |
| | | | | | | | | | ASSOCIATED VIRUS P5 | REGULATION/DNA) YING-YANG 1; |
| | | | | | | | | | INITIATOR ELEMENT DNA; | TRANSCRIPTION INITIATION, INITIATOR |
| | | | | | | | | | CHAIN: A, B;” | ELEMENT, YY1, ZINC 2 FINGER PROTEIN, |
| | | | | | | | | | | DNA-PROTEIN RECOGNITION, 3 |
| | | | | | | | | | | COMPLEX (TRANSCRIPTION |
| | | | | | | | | | | REGULATION/DNA)” |
| 463 | 1ubd | C | 117 | 209 | 1.70E−23 | −0.69 | 0.16 | | “YY1; CHAIN: C; ADENO- | “COMPLEX (TRANSCRIPTION |
| | | | | | | | | | ASSOCIATED VIRUS P5 | REGULATION/DNA) YING-YANG 1; |
| | | | | | | | | | INITIATOR ELEMENT DNA; | TRANSCRIPTION INITIATION, INITIATOR |
| | | | | | | | | | CHAIN: A, B;” | ELEMENT, YY1, ZINC 2 FINGER PROTEIN, |
| | | | | | | | | | | DNA-PROTEIN RECOGNITION, 3 |
| | | | | | | | | | | COMPLEX (TRANSCRIPTION |
| | | | | | | | | | | REGULATION/DNA)” |
| 463 | 1ubd | C | 655 | 763 | 1.00E−57 | | | 86.42 | “YY1; CHAIN: C; ADENO- | “COMPLEX (TRANSCRIPTION |
| | | | | | | | | | ASSOCIATED VIRUS P5 | REGULATION/DNA) YING-YANG 1; |
| | | | | | | | | | INITIATOR ELEMENT DNA; | TRANSCRIPTION INITIATION, INITIATOR |
| | | | | | | | | | CHAIN: A, B;” | ELEMENT, YY1, ZINC 2 FINGER PROTEIN, |
| | | | | | | | | | | DNA-PROTEIN RECOGNITION, 3 |
| | | | | | | | | | | COMPLEX (TRANSCRIPTION |
| | | | | | | | | | | REGULATION/DNA)” |
| 463 | 2adr | | 164 | 211 | 6.80E−11 | −0.58 | 0.25 | | ADR1; CHAIN: NULL; | “TRANSCRIPTION REGULATION |
| | | | | | | | | | | TRANSCRIPTION REGULATION, ADR1, |
| | | | | | | | | | | ZINC FINGER, NMR” |
| 463 | 2adr | | 241 | 316 | 5.10E−09 | −0.04 | 0.68 | | ADR1; CHAIN: NULL; | “TRANSCRIPTION REGULATION |
| | | | | | | | | | | TRANSCRIPTION REGULATION, ADR1, |
| | | | | | | | | | | ZINC FINGER, NMR” |
| 463 | 2gli | A | 597 | 763 | 1.50E−73 | 0.22 | 1 | | “ZINC FINGER PROTEIN | “COMPLEX (DNA-BINDING |
| | | | | | | | | | GLI1; CHAIN: A; DNA; | PROTEIN/DNA) FIVE-FINGER GLI; GLI, |
| | | | | | | | | | CHAIN: C, D;” | ZINC FINGER, COMPLEX (DNA-BINDING |
| | | | | | | | | | | PROTEIN/DNA)” |
| 463 | 2gli | A | 569 | 736 | 4.20E−71 | 0.17 | 1 | | “ZINC FINGER PROTEIN | “COMPLEX (DNA-BINDING |
| | | | | | | | | | GLI1; CHAIN: A; DNA; | PROTEIN/DNA) FIVE-FINGER GLI; GLI, |
| | | | | | | | | | CHAIN: C, D;” | ZINC FINGER, COMPLEX (DNA-BINDING |
| | | | | | | | | | | PROTEIN/DNA)” |
| 463 | 2gli | A | 373 | 540 | 1.30E−69 | −0.02 | 1 | | “ZINC FINGER PROTEIN | “COMPLEX (DNA-BINDING |
| | | | | | | | | | GLI1; CHAIN: A; DNA; | PROTEIN/DNA) FIVE-FINGER GLI; GLI, |
| | | | | | | | | | CHAIN: C, D;” | ZINC FINGER, COMPLEX (DNA-BINDING |
| | | | | | | | | | | PROTEIN/DNA)” |
| 463 | 2gli | A | 401 | 596 | 8.40E−69 | −0.05 | 0.96 | | “ZINC FINGER PROTEIN | “COMPLEX (DNA-BINDING |
| | | | | | | | | | GLI1; CHAIN: A; DNA; | PROTEIN/DNA) FIVE-FINGER GLI; GLI, |
| | | | | | | | | | CHAIN: C, D;” | ZINC FINGER, COMPLEX (DNA-BINDING |
| | | | | | | | | | | PROTEIN/DNA)” |
| 463 | 2gli | A | 292 | 428 | 6.30E−60 | 0.01 | 1 | | “ZINC FINGER PROTEIN | “COMPLEX (DNA-BINDING |
| | | | | | | | | | GLI1; CHAIN: A; DNA; | PROTEIN/DNA) FIVE-FINGER GLI; GLI, |
| | | | | | | | | | CHAIN: C, D;” | ZINC FINGER, COMPLEX (DNA-BINDING |
| | | | | | | | | | | PROTEIN/DNA)” |
| 463 | 2gli | A | 681 | 804 | 1.50E−47 | 0.13 | 0.77 | | “ZINC FINGER PROTEIN | “COMPLEX (DNA-BINDING |
| | | | | | | | | | GLI1; CHAIN: A; DNA; | PROTEIN/DNA) FIVE-FINGER GLI; GLI, |
| | | | | | | | | | CHAIN: C, D;” | ZINC FINGER, COMPLEX (DNA-BINDING |
| | | | | | | | | | | PROTEIN/DNA)” |
| 463 | 2gli | A | 465 | 593 | 1.70E−35 | 0.46 | 1 | | “ZINC FINGER PROTEIN | “COMPLEX (DNA-BINDING |
| | | | | | | | | | GLI1; CHAIN: A; DNA; | PROTEIN/DNA) FIVE-FINGER GLI; GLI, |
| | | | | | | | | | CHAIN: C, D;” | ZINC FINGER, COMPLEX (DNA-BINDING |
| | | | | | | | | | | PROTEIN/DNA)” |
| 463 | 2gli | A | 661 | 792 | 1.50E−33 | 0.12 | 1 | | “ZINC FINGER PROTEIN | “COMPLEX (DNA-BINDING |
| | | | | | | | | | GLI1; CHAIN: A; DNA; | PROTEIN/DNA) FIVE-FINGER GLI; GLI, |
| | | | | | | | | | CHAIN: C, D;” | ZINC FINGER, COMPLEX (DNA-BINDING |
| | | | | | | | | | | PROTEIN/DNA)” |
| 463 | 2gli | A | 521 | 649 | 1.70E−33 | 0.25 | 0.94 | | “ZINC FINGER PROTEIN | “COMPLEX (DNA-BINDING |
| | | | | | | | | | GLI1; CHAIN: A; DNA; | PROTEIN/DNA) FIVE-FINGER GLI; GLI, |
| | | | | | | | | | CHAIN: C, D;” | ZINC FINGER, COMPLEX (DNA-BINDING |
| | | | | | | | | | | PROTEIN/DNA)” |
| 463 | 2gli | A | 689 | 813 | 1.00E−31 | 0.08 | 0.74 | | “ZINC FINGER PROTEIN | “COMPLEX (DNA-BINDING |
| | | | | | | | | | GLI1; CHAIN: A; DNA; | PROTEIN/DNA) FIVE-FINGER GLI; GLI, |
| | | | | | | | | | CHAIN: C, D;” | ZINC FINGER, COMPLEX (DNA-BINDING |
| | | | | | | | | | | PROTEIN/DNA)” |
| 463 | 2gli | A | 317 | 453 | 3.40E−31 | 0.07 | 1 | | “ZINC FINGER PROTEIN | “COMPLEX (DNA-BINDING |
| | | | | | | | | | GLI1; CHAIN: A; DNA; | PROTEIN/DNA) FIVE-FINGER GLI; GLI, |
| | | | | | | | | | CHAIN: C, D;” | ZINC FINGER, COMPLEX (DNA-BINDING |
| | | | | | | | | | | PROTEIN/DNA)” |
| 463 | 2gli | A | 269 | 400 | 1.40E−27 | −0.08 | 0.47 | | “ZINC FINGER PROTEIN | “COMPLEX (DNA-BINDING |
| | | | | | | | | | GLI1; CHAIN: A; DNA; | PROTEIN/DNA) FIVE-FINGER GLI; GLI, |
| | | | | | | | | | CHAIN: C, D;” | ZINC FINGER, COMPLEX (DNA-BINDING |
| | | | | | | | | | | PROTEIN/DNA)” |
| 463 | 2gli | A | 215 | 369 | 8.50E−26 | −0.02 | 0.68 | | “ZINC FINGER PROTEIN | “COMPLEX (DNA-BINDING |
| | | | | | | | | | GLI1; CHAIN: A; DNA; | PROTEIN/DNA) FIVE-FINGER GLI; GLI, |
| | | | | | | | | | CHAIN: C, D;” | ZINC FINGER, COMPLEX (DNA-BINDING |
| | | | | | | | | | | PROTEIN/DNA)” |
| 463 | 2gli | A | 597 | 736 | 1.50E−73 | | | 90.28 | “ZINC FINGER PROTEIN | “COMPLEX (DNA-BINDING |
| | | | | | | | | | GLI1; CHAIN: A; DNA; | PROTEIN/DNA) FIVE-FINGER GLI; GLI, |
| | | | | | | | | | CHAIN: C, D;” | ZINC FINGER, COMPLEX (DNA-BINDING |
| | | | | | | | | | | PROTEIN/DNA)” |
| 465 | 1du3 | A | 54 | 158 | 2.10E−09 | 0.03 | −0.11 | | “DEATH RECEPTOR 5; | “APOPTOSIS TRAIL, DR5, COMPLEX” |
| | | | | | | | | | CHAIN: A, B, C, G, H, I; TNF- | |
| | | | | | | | | | RELATED APOPTOSIS | |
| | | | | | | | | | INDUCING LIGAND; CHAIN: | |
| | | | | | | | | | D, E, F, J, K, L;” | |
| 465 | 1dx5 | I | 19 | 107 | 2.10E−07 | −0.29 | 0.16 | | “THROMBIN LIGHT CHAIN; | “SERINE PROTEINASE COAGULATION |
| | | | | | | | | | CHAIN: A, B, C, D; | FACTOR II; COAGULATION FACTOR II; |
| | | | | | | | | | THROMBIN HEAVY CHAIN; | FETOMODULIN, TM, CD141 ANTIGEN; |
| | | | | | | | | | CHAIN: M, N, O, P; | EGR-CMK SERINE PROTEINASE, EGF- |
| | | | | | | | | | THROMBOMODULIN; | LIKE DOMAINS, ANTICOAGULANT |
| | | | | | | | | | CHAIN: I, J, K, L; THROMBIN | COMPLEX, 2 ANTIFIBRINOLYTIC |
| | | | | | | | | | INHIBITOR L-GLU-L-GLY-L- | COMPLEX” |
| | | | | | | | | | ARM; CHAIN: E, F, G, H;” | |
| 465 | 1ext | A | 7 | 168 | 1.10E−13 | | | 57.05 | “TUMOR NECROSIS | “SIGNALLING PROTEIN BINDING |
| | | | | | | | | | FACTOR RECEPTOR; | PROTEIN, CYTOKINE, SIGNALLING |
| | | | | | | | | | CHAIN: A, B;” | PROTEIN” |
| 465 | 1fvl | | 24 | 102 | 6.30E−08 | −0.2 | 0.06 | | FLAVORIDIN; 1FVL 4 | BLOOD COAGULATION INHIBITOR GP |
| | | | | | | | | | CHAIN: NULL IFVL 5 | IIB/IIIA ANTAGONIST 1FVL 9 |
| 465 | 1klo | | 66 | 221 | 4.20E−14 | 0.13 | 0.01 | | LAMININ; CHAIN: NULL; | GLYCOPROTEIN GLYCOPROTEIN |
| 465 | 1klo | | 27 | 205 | 4.20E−14 | | | 68.79 | LAMININ; CHAIN: NULL; | GLYCOPROTEIN GLYCOPROTEIN |
| 465 | 1skz | | 26 | 127 | 6.30E−13 | −0.51 | 0.06 | | ANTISTASIN; CHAIN: NULL; | “SERINE PROTEASE INHIBITOR FACTOR |
| | | | | | | | | | | XA INHIBITOR; ANTISTASIN, CRYSTAL |
| | | | | | | | | | | STRUCTURE, FACTOR XA INHIBITOR, 2 |
| | | | | | | | | | | SERINE PROTEASE INHIBITOR, |
| | | | | | | | | | | THROMBOSIS” |
| 465 | 1skz | | 47 | 154 | 4.20E−14 | | | 61.73 | ANTISTASIN; CHAIN: NULL; | “SERINE PROTEASE INHIBITOR FACTOR |
| | | | | | | | | | | XA INHIBITOR; ANTISTASIN, CRYSTAL |
| | | | | | | | | | | STRUCTURE, FACTOR XA INHIBITOR, 2 |
| | | | | | | | | | | SERINE PROTEASE INHIBITOR, |
| | | | | | | | | | | THROMBOSIS” |
| 465 | 4mt2 | | 168 | 221 | 1.00E−16 | 0 | −0.15 | | | METALLOTHIONEIN METALLOTHIONEIN |
| | | | | | | | | | | ISOFORM II 4MT2 3 |
| 466 | 1alh | A | 101 | 191 | 3.40E−26 | −0.58 | 0.34 | | “QGSR ZINC FINGER | “COMPLEX (ZINC FINGER/DNA) |
| | | | | | | | | | PEPTIDE; CHAIN: A; | COMPLEX (ZINC FINGER/DNA), ZINC |
| | | | | | | | | | DUPLEX | FINGER, DNA-BINDING PROTEIN” |
| | | | | | | | | | OLIGONUCLEOTIDE | |
| | | | | | | | | | BINDING SITE; CHAIN: B, | |
| | | | | | | | | | C;” | |
| 466 | 1alh | A | 70 | 163 | 1.70E−25 | −0.37 | 0.21 | | “QGSR ZINC FINGER | “COMPLEX (ZINC FINGER/DNA) |
| | | | | | | | | | PEPTIDE; CHAIN: A; | COMPLEX (ZINC FINGER/DNA), ZINC |
| | | | | | | | | | DUPLEX | FINGER, DNA-BINDING PROTEIN” |
| | | | | | | | | | OLIGONUCLEOTIDE | |
| | | | | | | | | | BINDING SITE; CHAIN: B, | |
| | | | | | | | | | C;” | |
| 466 | 1alh | A | 101 | 220 | 8.40E−25 | −0.23 | 0.18 | | “QGSR ZINC FINGER | “COMPLEX (ZINC FINGER/DNA) |
| | | | | | | | | | PEPTIDE; CHAIN: A; | COMPLEX (ZINC FINGER/DNA), ZINC |
| | | | | | | | | | DUPLEX | FINGER, DNA-BINDING PROTEIN” |
| | | | | | | | | | OLIGONUCLEOTIDE | |
| | | | | | | | | | BINDING SITE; CHAIN: B, | |
| | | | | | | | | | C;” | |
| 466 | 1mey | C | 306 | 387 | 1.50E−50 | 0.49 | 1 | | “DNA; CHAIN: A, B, D, E; | “COMPLEX (ZINC FINGER/DNA) ZINC |
| | | | | | | | | | CONSENSUS ZINC FINGER | FINGER, PROTEIN-DNA INTERACTION, |
| | | | | | | | | | PROTEIN; CHAIN: C, F, G;” | PROTEIN DESIGN, 2 CRYSTAL |
| | | | | | | | | | | STRUCTURE, COMPLEX (ZINC |
| | | | | | | | | | | FINGER/DNA)” |
| 466 | 1mey | C | 194 | 275 | 1.50E−50 | 0.27 | 1 | | “DNA; CHAIN: A, B, D, E; | “COMPLEX (ZINC FINGER/DNA) ZINC |
| | | | | | | | | | CONSENSUS ZINC FINGER | FINGER, PROTEIN-DNA INTERACTION, |
| | | | | | | | | | PROTEIN; CHAIN: C, F, G;” | PROTEIN DESIGN, 2 CRYSTAL |
| | | | | | | | | | | STRUCTURE, COMPLEX (ZINC |
| | | | | | | | | | | FINGER/DNA)” |
| 466 | 1mey | C | 278 | 359 | 1.70E−50 | 0.48 | 1 | | “DNA; CHAIN: A, B, D, E; | “COMPLEX (ZINC FINGER/DNA) ZINC |
| | | | | | | | | | CONSENSUS ZINC FINGER | FINGER, PROTEIN-DNA INTERACTION, |
| | | | | | | | | | PROTEIN; CHAIN: C, F, G;” | PROTEIN DESIGN, 2 CRYSTAL |
| | | | | | | | | | | STRUCTURE, COMPLEX (ZINC |
| | | | | | | | | | | FINGER/DNA)” |
| 466 | 1mey | C | 166 | 247 | 1.70E−49 | −0.12 | 1 | | “DNA; CHAIN: A, B, D, E; | “COMPLEX (ZINC FINGER/DNA) ZINC |
| | | | | | | | | | CONSENSUS ZINC FINGER | FINGER, PROTEIN-DNA INTERACTION, |
| | | | | | | | | | PROTEIN; CHAIN: C, F, G;” | PROTEIN DESIGN, 2 CRYSTAL |
| | | | | | | | | | | STRUCTURE, COMPLEX (ZINC |
| | | | | | | | | | | FINGER/DNA)” |
| 466 | 1mey | C | 138 | 219 | 1.20E−48 | −0.31 | 0.92 | | “DNA; CHAIN: A, B, D, E; | “COMPLEX (ZINC FINGER/DNA) ZINC |
| | | | | | | | | | CONSENSUS ZINC FINGER | FINGER, PROTEIN-DNA INTERACTION, |
| | | | | | | | | | PROTEIN; CHAIN: C, F, G;” | PROTEIN DESIGN, 2 CRYSTAL |
| | | | | | | | | | | STRUCTURE, COMPLEX (ZINC |
| | | | | | | | | | | FINGER/DNA)” |
| 466 | 1mey | C | 100 | 191 | 3.40E−45 | 0.05 | 0.69 | | “DNA; CHAIN: A, B, D, E; | “COMPLEX (ZINC FINGER/DNA) ZINC |
| | | | | | | | | | CONSENSUS ZINC FINGER | FINGER, PROTEIN-DNA INTERACTION, |
| | | | | | | | | | PROTEIN; CHAIN: C, F, G;” | PROTEIN DESIGN, 2 CRYSTAL |
| | | | | | | | | | | STRUCTURE, COMPLEX (ZINC |
| | | | | | | | | | | FINGER/DNA)” |
| 466 | 1mey | C | 41 | 125 | 5.10E−42 | −0.37 | 0.13 | | “DNA; CHAIN: A, B, D, E; | “COMPLEX (ZINC FINGER/DNA) ZINC |
| | | | | | | | | | CONSENSUS ZINC FINGER | FINGER, PROTEIN-DNA INTERACTION, |
| | | | | | | | | | PROTEIN; CHAIN: C, F, G;” | PROTEIN DESIGN, 2 CRYSTAL |
| | | | | | | | | | | STRUCTURE, COMPLEX (ZINC |
| | | | | | | | | | | FINGER/DNA)” |
| 466 | 1mey | C | 69 | 163 | 6.80E−42 | −0.4 | 0.84 | | “DNA; CHAIN: A, B, D, E; | “COMPLEX (ZINC FINGER/DNA) ZINC |
| | | | | | | | | | CONSENSUS ZINC FINGER | FINGER, PROTEIN-DNA INTERACTION, |
| | | | | | | | | | PROTEIN; CHAIN: C, F, G;” | PROTEIN DESIGN, 2 CRYSTAL |
| | | | | | | | | | | STRUCTURE, COMPLEX (ZINC |
| | | | | | | | | | | FINGER/DNA)” |
| 466 | 1mey | G | 98 | 125 | 1.70E−11 | −0.17 | 0.82 | | “DNA; CHAIN: A, B, D, E; | “COMPLEX (ZINC FINGER/DNA) ZINC |
| | | | | | | | | | CONSENSUS ZINC FINGER | FINGER, PROTEIN-DNA INTERACTION, |
| | | | | | | | | | PROTEIN; CHAIN: C, F, G;” | PROTEIN DESIGN, 2 CRYSTAL |
| | | | | | | | | | | STRUCTURE, COMPLEX (ZINC |
| | | | | | | | | | | FINGER/DNA)” |
| 466 | 1mey | C | 306 | 388 | 1.50E−50 | | | 105.46 | “DNA, CHAIN: A, B, D, E; | “COMPLEX (ZINC FINGER/DNA) ZINC |
| | | | | | | | | | CONSENSUS ZINC FINGER | FINGER, PROTEIN-DNA INTERACTION, |
| | | | | | | | | | PROTEIN; CHAIN: C, F, G;” | PROTEIN DESIGN, 2 CRYSTAL |
| | | | | | | | | | | STRUCTURE, COMPLEX (ZINC |
| | | | | | | | | | | FINGER/DNA)” |
| 466 | 1tf6 | A | 139 | 284 | 1.20E−38 | 0.27 | 0.9 | | “TFIIIA; CHAIN: A, D; 5S | “COMPLEX (TRANSCRIPTION |
| | | | | | | | | | RIBOSOMAL RNA GENE; | REGULATION/DNA) COMPLEX |
| | | | | | | | | | CHAIN: B, C, E, F;” | (TRANSCRIPTION REGULATION/DNA), |
| | | | | | | | | | | RNA POLYMERASE III, 2 TRANSCRIPTION |
| | | | | | | | | | | INITIATION, ZINC FINGER PROTEIN” |
| 466 | 1tf6 | A | 167 | 312 | 1.40E−36 | −0.15 | 0.74 | | “TFIIIA; CHAIN: A, D; 5S | “COMPLEX (TRANSCRIPTION |
| | | | | | | | | | RIBOSOMAL RNA GENE; | REGULATION/DNA) COMPLEX |
| | | | | | | | | | CHAIN: B, C, E, F;” | (TRANSCRIPTION REGULATION/DNA), |
| | | | | | | | | | | RNA POLYMERASE III, 2 TRANSCRIPTION |
| | | | | | | | | | | INITIATION, ZINC FINGER PROTEIN” |
| 466 | 1tf6 | A | 70 | 228 | 1.70E−34 | −0.36 | 0.25 | | “TFIIIA; CHAIN: A, D; 5S | “COMPLEX (TRANSCRIPTION |
| | | | | | | | | | RIBOSOMAL RNA GENE; | REGULATION/DNA) COMPLEX |
| | | | | | | | | | CHAIN: B, C, E, F;” | (TRANSCRIPTION REGULATION/DNA), |
| | | | | | | | | | | RNA POLYMERASE III, 2 TRANSCRIPTION |
| | | | | | | | | | | INITIATION, ZINC FINGER PROTEIN” |
| 466 | 1tf6 | A | 194 | 359 | 1.70E−39 | | | 107.88 | “TFIIIA; CHAIN: A, D; 5S | “COMPLEX (TRANSCRIPTION |
| | | | | | | | | | RIBOSOMAL RNA GENE; | REGULATION/DNA) COMPLEX |
| | | | | | | | | | CHAIN: B, C, E, F;” | (TRANSCRIPTION REGULATION/DNA), |
| | | | | | | | | | | RNA POLYMERASE III, 2 TRANSCRIPTION |
| | | | | | | | | | | INITIATION, ZINC FINGER PROTEIN” |
| 466 | 1ubd | C | 220 | 331 | 6.30E−54 | 0.06 | 1 | | “YY1; CHAIN: C; ADENO- | “COMPLEX (TRANSCRIPTION |
| | | | | | | | | | ASSOCIATED VIRUS P5 | REGULATION/DNA) YING-YANG 1; |
| | | | | | | | | | INITIATOR ELEMENT DNA; | TRANSCRIPTION INITIATION, INITIATOR |
| | | | | | | | | | CHAIN: A, B;” | ELEMENT, YY1, ZINC 2 FINGER PROTEIN, |
| | | | | | | | | | | DNA-PROTEIN RECOGNITION, 3 |
| | | | | | | | | | | COMPLEX (TRANSCRIPTION |
| | | | | | | | | | | REGULATION/DNA)” |
| 466 | 1ubd | C | 192 | 304 | 4.20E−53 | 0.17 | 0.99 | | “YY1; CHAIN: C; ADENO- | “COMPLEX (TRANSCRIPTION |
| | | | | | | | | | ASSOCIATED VIRUS P5 | REGULATION/DNA) YING-YANG 1; |
| | | | | | | | | | INITIATOR ELEMENT DNA; | TRANSCRIPTION INITIATION, INITIATOR |
| | | | | | | | | | CHAIN: A, B;” | ELEMENT, YY1, ZINC 2 FINGER PROTEIN, |
| | | | | | | | | | | DNA-PROTEIN RECOGNITION, 3 |
| | | | | | | | | | | COMPLEX (TRANSCRIPTION |
| | | | | | | | | | | REGULATION/DNA)” |
| 466 | 1ubd | C | 248 | 359 | 1.70E−52 | 0.1 | 1 | | “YY1; CHAIN: C; ADENO- | “COMPLEX (TRANSCRIPTION |
| | | | | | | | | | ASSOCIATED VIRUS P5 | REGULATION/DNA) YING-YANG 1; |
| | | | | | | | | | INITIATOR ELEMENT DNA; | TRANSCRIPTION INITIATION, INITIATOR |
| | | | | | | | | | CHAIN: A, B;” | ELEMENT, YY1, ZINC 2 FINGER PROTEIN, |
| | | | | | | | | | | DNA-PROTEIN RECOGNITION, 3 |
| | | | | | | | | | | COMPLEX (TRANSCRIPTION |
| | | | | | | | | | | REGULATION/DNA)” |
| 466 | 1ubd | C | 276 | 385 | 2.10E−52 | 0.19 | 0.89 | | “YY1; CHAIN: C; ADENO- | “COMPLEX (TRANSCRIPTION |
| | | | | | | | | | ASSOCIATED VIRUS P5 | REGULATION/DNA) YING-YANG 1; |
| | | | | | | | | | INITIATOR ELEMENT DNA; | TRANSCRIPTION INITIATION, INITIATOR |
| | | | | | | | | | CHAIN: A, B;” | ELEMENT, YY1, ZINC 2 FINGER PROTEIN, |
| | | | | | | | | | | DNA-PROTEIN RECOGNITION, 3 |
| | | | | | | | | | | COMPLEX (TRANSCRIPTION |
| | | | | | | | | | | REGULATION/DNA)” |
| 466 | 1ubd | C | 135 | 275 | 4.20E−46 | −0.06 | 1 | | “YY1; CHAIN: C; ADENO- | “COMPLEX (TRANSCRIPTION |
| | | | | | | | | | ASSOCIATED VIRUS P5 | REGULATION/DNA) YING-YANG 1; |
| | | | | | | | | | INITIATOR ELEMENT DNA; | TRANSCRIPTION INITIATION, INITIATOR |
| | | | | | | | | | CHAIN: A, B;” | ELEMENT, YY1, ZINC 2 FINGER PROTEIN, |
| | | | | | | | | | | DNA-PROTEIN RECOGNITION, 3 |
| | | | | | | | | | | COMPLEX (TRANSCRIPTION |
| | | | | | | | | | | REGULATION/DNA)” |
| 466 | 1ubd | C | 98 | 247 | 8.40E−38 | −0.15 | 0.65 | | “YY1; CHAIN: C; ADENO- | “COMPLEX (TRANSCRIPTION |
| | | | | | | | | | ASSOCIATED VIRUS P5 | REGULATION/DNA) YING-YANG 1; |
| | | | | | | | | | INITIATOR ELEMENT DNA; | TRANSCRIPTION INITIATION, INITIATOR |
| | | | | | | | | | CHAIN: A, B;” | ELEMENT, YY1, ZINC 2 FINGER PROTEIN, |
| | | | | | | | | | | DNA-PROTEIN RECOGNITION, 3 |
| | | | | | | | | | | COMPLEX (TRANSCRIPTION |
| | | | | | | | | | | REGULATION/DNA)” |
| 466 | 1ubd | C | 174 | 275 | 1.70E−34 | 0.02 | 1 | | “YY1; CHAIN: C; ADENO- | “COMPLEX (TRANSCRIPTION |
| | | | | | | | | | ASSOCIATED VIRUS P5 | REGULATION/DNA) YING-YANG 1; |
| | | | | | | | | | INITIATOR ELEMENT DNA; | TRANSCRIPTION INITIATION, INITIATOR |
| | | | | | | | | | CHAIN: A, B;” | ELEMENT, YY1, ZINC 2 FINGER PROTEIN, |
| | | | | | | | | | | DNA-PROTEIN RECOGNITION, 3 |
| | | | | | | | | | | COMPLEX (TRANSCRIPTION |
| | | | | | | | | | | REGULATION/DNA)” |
| 466 | 1ubd | C | 108 | 219 | 1.00E−32 | −0.74 | 0.54 | | “YY1; CHAIN: C; ADENO- | “COMPLEX (TRANSCRIPTION |
| | | | | | | | | | ASSOCIATED VIRUS P5 | REGULATION/DNA) YING-YANG 1; |
| | | | | | | | | | INITIATOR ELEMENT DNA; | TRANSCRIPTION INITIATION, INITIATOR |
| | | | | | | | | | CHAIN: A, B;” | ELEMENT, YY1, ZINC 2 FINGER PROTEIN, |
| | | | | | | | | | | DNA-PROTEIN RECOGNITION, 3 |
| | | | | | | | | | | COMPLEX (TRANSCRIPTION |
| | | | | | | | | | | REGULATION/DNA)” |
| 466 | 1ubd | C | 80 | 191 | 8.50E−32 | −0.51 | 0.19 | | “YY1; CHAIN: C; ADENO- | “COMPLEX (TRANSCRIPTION |
| | | | | | | | | | ASSOCIATED VIRUS P5 | REGULATION/DNA) YING-YANG 1; |
| | | | | | | | | | INITIATOR ELEMENT DNA; | TRANSCRIPTION INITIATION, INITIATOR |
| | | | | | | | | | CHAIN: A, B;” | ELEMENT, YY1, ZINC 2 FINGER PROTEIN, |
| | | | | | | | | | | DNA-PROTEIN RECOGNITION, 3 |
| | | | | | | | | | | COMPLEX (TRANSCRIPTION |
| | | | | | | | | | | REGULATION/DNA)” |
| 466 | 1ubd | C | 44 | 163 | 1.00E−28 | −0.25 | 0.49 | | “YY1; CHAIN: C; ADENO- | “COMPLEX (TRANSCRIPTION |
| | | | | | | | | | ASSOCIATED VIRUS P5 | REGULATION/DNA) YING-YANG 1; |
| | | | | | | | | | INITIATOR ELEMENT DNA; | TRANSCRIPTION INITIATION, INITIATOR |
| | | | | | | | | | CHAIN: A, B;” | ELEMENT, YY1, ZINC 2 FINGER PROTEIN, |
| | | | | | | | | | | DNA-PROTEIN RECOGNITION, 3 |
| | | | | | | | | | | COMPLEX (TRANSCRIPTION |
| | | | | | | | | | | REGULATION/DNA)” |
| 466 | 1ubd | C | 81 | 219 | 2.10E−27 | −0.15 | 0.9 | | “YY1; CHAIN: C; ADENO- | “COMPLEX (TRANSCRIPTION |
| | | | | | | | | | ASSOCIATED VIRUS P5 | REGULATION/DNA) YING-YANG 1; |
| | | | | | | | | | INITIATOR ELEMENT DNA; | TRANSCRIPTION INITIATION, INITIATOR |
| | | | | | | | | | CHAIN: A, B;” | ELEMENT, YY1, ZINC 2 FINGER PROTEIN, |
| | | | | | | | | | | DNA-PROTEIN RECOGNITION, 3 |
| | | | | | | | | | | COMPLEX (TRANSCRIPTION |
| | | | | | | | | | | REGULATION/DNA)” |
| 466 | 1ubd | C | 224 | 332 | 6.30E−54 | | | 86.9 | “YY1; CHAIN: C; ADENO- | “COMPLEX (TRANSCRIPTION |
| | | | | | | | | | ASSOCIATED VIRUS P5 | REGULATION/DNA) YING-YANG 1; |
| | | | | | | | | | INITIATOR ELEMENT DNA; | TRANSCRIPTION INITIATION, INITIATOR |
| | | | | | | | | | CHAIN: A, B;” | ELEMENT, YY1, ZINC 2 FINGER PROTEIN, |
| | | | | | | | | | | DNA-PROTEIN RECOGNITION, 3 |
| | | | | | | | | | | COMPLEX (TRANSCRIPTION |
| | | | | | | | | | | REGULATION/DNA)” |
| 466 | 2adr | | 101 | 165 | 5.10E−13 | −0.38 | 0.42 | | ADR1; CHAIN: NULL; | “TRANSCRIPTION REGULATION |
| | | | | | | | | | | TRANSCRIPTION REGULATION, ADR1, |
| | | | | | | | | | | ZINC FINGER, NMR” |
| 466 | 2adr | | 77 | 127 | 5.10E−13 | −0.51 | 0.06 | | ADR1; CHAIN: NULL; | “TRANSCRIPTION REGULATION |
| | | | | | | | | | | TRANSCRIPTION REGULATION, ADR1, |
| | | | | | | | | | | ZINC FINGER, NMR” |
| 466 | 2gli | A | 222 | 361 | 2.10E−68 | 0.42 | 1 | | “ZINC FINGER PROTEIN | “COMPLEX (DNA-BINDING |
| | | | | | | | | | GLI1; CHAIN: A; DNA; | PROTEIN/DNA) FIVE-FINGER GLI; GLI, |
| | | | | | | | | | CHAIN: C, D;” | ZINC FINGER, COMPLEX (DNA-BINDING |
| | | | | | | | | | | PROTEIN/DNA)” |
| 466 | 2gli | A | 138 | 305 | 4.20E−59 | 0.07 | 0.96 | | “ZINC FINGER PROTEIN | “COMPLEX (DNA-BINDING |
| | | | | | | | | | GLI1; CHAIN: A; DNA; | PROTEIN/DNA) FIVE-FINGER GLI; GLI, |
| | | | | | | | | | CHAIN: C, D;” | ZINC FINGER, COMPLEX (DNA-BINDING |
| | | | | | | | | | | PROTEIN/DNA)” |
| 466 | 2gli | A | 101 | 277 | 1.30E−55 | 0.07 | 1 | | “ZINC FINGER PROTEIN | “COMPLEX (DNA-BINDING |
| | | | | | | | | | GLI1; CHAIN: A; DNA; | PROTEIN/DNA) FIVE-FINGER GLI; GLI, |
| | | | | | | | | | CHAIN: C, D;” | ZINC FINGER, COMPLEX (DNA-BINDING |
| | | | | | | | | | | PROTEIN/DNA)” |
| 466 | 2gli | A | 250 | 384 | 1.10E−52 | 0.01 | 0.83 | | “ZINC FINGER PROTEIN | “COMPLEX (DNA-BINDING |
| | | | | | | | | | GLI1; CHAIN: A; DNA; | PROTEIN/DNA) FIVE-FINGER GLI; GLI, |
| | | | | | | | | | CHAIN: C, D;” | ZINC FINGER, COMPLEX (DNA-BINDING |
| | | | | | | | | | | PROTEIN/DNA)” |
| 466 | 2gli | A | 81 | 249 | 2.10E−42 | 0.01 | 0.99 | | “ZINC FINGER PROTEIN | “COMPLEX (DNA-BINDING |
| | | | | | | | | | GLI1; CHAIN: A; DNA; | PROTEIN/DNA) FIVE-FINGER GLI; GLI, |
| | | | | | | | | | CHAIN: C, D;” | ZINC FINGER, COMPLEX (DNA-BINDING |
| | | | | | | | | | | PROTEIN/DNA)” |
| 466 | 2gli | A | 80 | 221 | 8.50E−33 | −0.14 | 0.36 | | “ZINC FINGER PROTEIN | “COMPLEX (DNA-BINDING |
| | | | | | | | | | GLI1; CHAIN: A; DNA; | PROTEIN/DNA) FIVE-FINGER GLI; GLI, |
| | | | | | | | | | CHAIN: C, D;” | ZINC FINGER, COMPLEX (DNA-BINDING |
| | | | | | | | | | | PROTEIN/DNA)” |
| 466 | 2gli | A | 18 | 162 | 6.80E−30 | −0.43 | 0.07 | | “ZINC FINGER PROTEIN | “COMPLEX (DNA-BINDING |
| | | | | | | | | | GLI1; CHAIN: A; DNA; | PROTEIN/DNA) FIVE-FINGER GLI; GLI, |
| | | | | | | | | | CHAIN: C, D;” | ZINC FINGER, COMPLEX (DNA-BINDING |
| | | | | | | | | | | PROTEIN/DNA)” |
| 466 | 2gli | A | 222 | 361 | 2.10E−68 | | | 98.19 | “ZINC FINGER PROTEIN | “COMPLEX (DNA-BINDING |
| | | | | | | | | | GLI1; CHAIN: A; DNA; | PROTEIN/DNA) FIVE-FINGER GLI; GLI |
| | | | | | | | | | CHAIN: C, D;” | ZINC FINGER, COMPLEX (DNA-BINDING |
| | | | | | | | | | | PROTEIN/DNA)” |
| 469 | 1a7a | A | 2 | 113 | 3.20E−18 | 0.38 | 0.19 | | “S- | “HYDROLASE HYDROLASE, NAD |
| | | | | | | | | | ADENOSYLHOMOCYSTEINE | BINDING PROTEIN” |
| | | | | | | | | | HYDROLASE; CHAIN: A, | |
| | | | | | | | | | B;” | |
| 469 | 1dxy | | 2 | 114 | 3.20E−21 | −0.11 | 0.1 | | D-2- | “OXIDOREDUCTASE D-HICDH, R-HICDH, |
| | | | | | | | | | HYDROXYISOCAPROATE | R-2-HYDROXYISOCAPROATE D-2- |
| | | | | | | | | | DEHYDROGENASE; CHAIN: | HYDROXYCARBOXYLATE |
| | | | | | | | | | NULL; | DEHYDROGENASE, D-LACTATE 2 |
| | | | | | | | | | | DEHYDROGENASE, OXIDOREDUCTASE” |
| 469 | 1f0y | A | 3 | 113 | 3.20E−14 | 0.08 | −0.17 | | “L-3-HYDROXYACYL-COA | OXIDOREDUCTASE HCDH; ABORTIVE |
| | | | | | | | | | DEHYDROGENASE; CHAIN: | TERNARY COMPLEX |
| | | | | | | | | | A, B;” | |
| 469 | 1gdh | A | 2 | 114 | 3.20E−17 | 0.01 | 0.43 | | | OXIDOREDUCTASE(CHOH (D)-NAD(P) + (A)) |
| | | | | | | | | | | D-GLYCERATE DEHYDROGENASE |
| | | | | | | | | | | (APO FORM) (E.C.1.1.1.29) 1GDH 3 |
| 469 | 1pgj | A | 1 | 109 | 4.80E−15 | 0.02 | 0.13 | | “6-PHOSPHOGLUCONATE | “OXIDOREDUCTASE 6PGDH, 6-PGDH; |
| | | | | | | | | | DEHYDROGENASE; CHAIN: | OXIDOREDUCTASE, CHOH(D)-NADP + (B)” |
| | | | | | | | | | A, B;” | |
| 469 | 1psd | A | 2 | 114 | 1.60E−20 | −0.3 | 0.1 | | | OXIDOREDUCTASE (NAD(A)) D-3- |
| | | | | | | | | | | PHOSPHOGLYCERATE |
| | | | | | | | | | | DEHYDROGENASE |
| | | | | | | | | | | (PHOSPHOGLYCERATE 1PSD 3 |
| | | | | | | | | | | DEHYDROGENASE) (E.C.1.1.1.95) 1PSD 4 |
| 469 | 2dld | A | 3 | 113 | 1.40E−23 | −0.15 | 0.12 | | “D-LACTATE | OXIDOREDUCTASE (CHOH(D)-NAD + (A)) |
| | | | | | | | | | DEHYDROGENASE; 2DLD 5 | R-LACTATE DEHYDROGENASE; 2DLD 7 |
| | | | | | | | | | CHAIN: A, B; 2DLD 6” | |
| 469 | 2nac | A | 1 | 114 | 6.40E−20 | 0.18 | 0.21 | | | “OXIDOREDUCTASE(ALDEHYDE(D), NAD + (A)) |
| | | | | | | | | | | NAD-DEPENDENT FORMATE |
| | | | | | | | | | | DEHYDROGENASE (E.C.1.2.1.2) 2NAC 3 |
| | | | | | | | | | | (APO FORM) 2NAC 4” |
| 469 | 2pgd | | 3 | 113 | 6.40E−16 | 0.01 | −0.15 | | | OXIDOREDUCTASE (CHOH(D)-NADP + (A)) |
| | | | | | | | | | | 6-PHOSPHOGLUCONATE |
| | | | | | | | | | | DEHYDROGENASE (6-PGDH) (E.C.1.1.1.44) |
| | | | | | | | | | | 2PGD 3 |
| 470 | 1alh | A | 178 | 251 | 8.50E−20 | −0.38 | 0.19 | | “QGSR ZINC FINGER | “COMPLEX (ZINC FINGER/DNA) |
| | | | | | | | | | PEPTIDE; CHAIN: A; | COMPLEX (ZINC FINGER/DNA), ZINC |
| | | | | | | | | | DUPLEX | FINGER, DNA-BINDING PROTEIN” |
| | | | | | | | | | OLIGONUCLEOTIDE | |
| | | | | | | | | | BINDING SITE; CHAIN: B, | |
| | | | | | | | | | C;” | |
| 470 | 1mey | C | 493 | 574 | 6.80E−51 | 0.7 | 1 | | “DNA; CHAIN: A, B, D, E; | “COMPLEX (ZINC FINGER/DNA) ZINC |
| | | | | | | | | | CONSENSUS ZINC FINGER | FINGER, PROTEIN-DNA INTERACTION, |
| | | | | | | | | | PROTEIN; CHAIN: C, F, G;” | PROTEIN DESIGN, 2 CRYSTAL |
| | | | | | | | | | | STRUCTURE, COMPLEX (ZINC |
| | | | | | | | | | | FINGER/DNA)” |
| 470 | 1mey | C | 465 | 546 | 6.80E−51 | 0.4 | 1 | | “DNA; CHAIN: A, B, D, E; | “COMPLEX (ZINC FINGER/DNA) ZINC |
| | | | | | | | | | CONSENSUS ZINC FINGER | FINGER, PROTEIN-DNA INTERACTION, |
| | | | | | | | | | PROTEIN; CHAIN: C, F, G;” | PROTEIN DESIGN, 2 CRYSTAL |
| | | | | | | | | | | STRUCTURE, COMPLEX (ZINC |
| | | | | | | | | | | FINGER/DNA)” |
| 470 | 1mey | C | 577 | 658 | 1.70E−50 | 0.62 | 1 | | “DNA; CHAIN: A, B, D, E; | “COMPLEX (ZINC FINGER/DNA) ZINC |
| | | | | | | | | | CONSENSUS ZINC FINGER | FINGER, PROTEIN-DNA INTERACTION, |
| | | | | | | | | | PROTEIN; CHAIN: C, F, G;” | PROTEIN DESIGN, 2 CRYSTAL |
| | | | | | | | | | | STRUCTURE, COMPLEX (ZINC |
| | | | | | | | | | | FINGER/DNA)” |
| 470 | 1mey | C | 521 | 602 | 1.70E−50 | 0.29 | 1 | | “DNA; CHAIN: A, B, D, E; | “COMPLEX (ZINC FINGER/DNA) ZINC |
| | | | | | | | | | CONSENSUS ZINC FINGER | FINGER, PROTEIN-DNA INTERACTION, |
| | | | | | | | | | PROTEIN; CHAIN: C, F, G;” | PROTEIN DESIGN, 2 CRYSTAL |
| | | | | | | | | | | STRUCTURE, COMPLEX (ZINC |
| | | | | | | | | | | FINGER/DNA)” |
| 470 | 1mey | C | 605 | 686 | 1.70E−50 | 0.56 | 1 | | “DNA; CHAIN: A, B, D, E; | “COMPLEX (ZINC FINGER/DNA) ZINC |
| | | | | | | | | | CONSENSUS ZINC FINGER | FINGER, PROTEIN-DNA INTERACTION, |
| | | | | | | | | | PROTEIN; CHAIN: C, F, G;” | PROTEIN DESIGN, 2 CRYSTAL |
| | | | | | | | | | | STRUCTURE, COMPLEX (ZINC |
| | | | | | | | | | | FINGER/DNA)” |
| 470 | 1mey | C | 437 | 518 | 1.70E−50 | 0.24 | 1 | | “DNA; CHAIN: A, B, D, E; | “COMPLEX (ZINC FINGER/DNA) ZINC |
| | | | | | | | | | CONSENSUS ZINC FINGER | FINGER, PROTEIN-DNA INTERACTION, |
| | | | | | | | | | PROTEIN; CHAIN: C, F, G;” | PROTEIN DESIGN, 2 CRYSTAL |
| | | | | | | | | | | STRUCTURE, COMPLEX (ZINC |
| | | | | | | | | | | FINGER/DNA)” |
| 470 | 1mey | C | 549 | 630 | 3.40E−50 | 0.3 | 1 | | “DNA; CHAIN: A, B, D, E; | “COMPLEX (ZINC FINGER/DNA) ZINC |
| | | | | | | | | | CONSENSUS ZINC FINGER | FINGER, PROTEIN-DNA INTERACTION, |
| | | | | | | | | | PROTEIN; CHAIN: C, F, G;” | PROTEIN DESIGN, 2 CRYSTAL |
| | | | | | | | | | | STRUCTURE, COMPLEX (ZINC |
| | | | | | | | | | | FINGER/DNA) |
| 470 | 1mey | C | 409 | 490 | 1.70E−49 | 0.03 | 1 | | DNA; CHAIN: A, B, D, E; | “COMPLEX (ZINC FINGER/DNA) ZINC |
| | | | | | | | | | CONSENSUS ZINC FINGER | FINGER, PROTEIN-DNA INTERACTION, |
| | | | | | | | | | PROTEIN; CHAIN: C, F, G;” | PROTEIN DESIGN, 2 CRYSTAL |
| | | | | | | | | | | STRUCTURE, COMPLEX (ZINC |
| | | | | | | | | | | FINGER/DNA)” |
| 470 | 1mey | C | 381 | 462 | 5.10E−49 | 0.18 | 1 | | “DNA; CHAIN: A, B, D, E; | “COMPLEX (ZINC FINGER/DNA) ZINC |
| | | | | | | | | | CONSENSUS ZINC FINGER | FINGER, PROTEIN-DNA INTERACTION, |
| | | | | | | | | | PROTEIN; CHAIN: C, F, G;” | PROTEIN DESIGN, 2 CRYSTAL |
| | | | | | | | | | | STRUCTURE, COMPLEX (ZINC |
| | | | | | | | | | | FINGER/DNA)” |
| 470 | 1mey | C | 353 | 434 | 1.50E−48 | 0.62 | 1 | | “DNA; CHAIN: A, B, D, E; | “COMPLEX (ZINC FINGER/DNA) ZINC |
| | | | | | | | | | CONSENSUS ZINC FINGER | FINGER, PROTEIN-DNA INTERACTION, |
| | | | | | | | | | PROTEIN; CHAIN: C, F, G;” | PROTEIN DESIGN, 2 CRYSTAL |
| | | | | | | | | | | STRUCTURE, COMPLEX (ZINC |
| | | | | | | | | | | FINGER/DNA)” |
| 470 | 1mey | C | 325 | 406 | 1.00E−47 | 0.45 | 1 | | “DNA; CHAIN: A, B, D, E; | “COMPLEX (ZINC FINGER/DNA) ZINC |
| | | | | | | | | | CONSENSUS ZINC FINGER | FINGER, PROTEIN-DNA INTERACTION, |
| | | | | | | | | | PROTEIN; CHAIN: C, F, G;” | PROTEIN DESIGN, 2 CRYSTAL |
| | | | | | | | | | | STRUCTURE, COMPLEX (ZINC |
| | | | | | | | | | | FINGER/DNA)” |
| 470 | 1mey | C | 297 | 378 | 8.50E−46 | 0.51 | 1 | | “DNA; CHAIN: A, B, D, E; | “COMPLEX (ZINC FINGER/DNA) ZINC |
| | | | | | | | | | CONSENSUS ZINC FINGER | FINGER, PROTEIN-DNA INTERACTION, |
| | | | | | | | | | PROTEIN; CHAIN: C, F, G;” | PROTEIN DESIGN, 2 CRYSTAL |
| | | | | | | | | | | STRUCTURE, COMPLEX (ZINC |
| | | | | | | | | | | FINGER/DNA)” |
| 470 | 1mey | C | 254 | 350 | 3.40E−41 | 0.2 | 0.89 | | “DNA; CHAIN: A, B, D, E; | “COMPLEX (ZINC FINGER/DNA) ZINC |
| | | | | | | | | | CONSENSUS ZINC FINGER | FINGER, PROTEIN-DNA INTERACTION, |
| | | | | | | | | | PROTEIN; CHAIN: C, F, G;” | PROTEIN DESIGN, 2 CRYSTAL |
| | | | | | | | | | | STRUCTURE, COMPLEX (ZINC |
| | | | | | | | | | | FINGER/DNA)” |
| 470 | 1mey | C | 205 | 279 | 1.00E−34 | −0.06 | 0.54 | | “DNA; CHAIN: A, B, D, E; | “COMPLEX (ZINC FINGER/DNA) ZINC |
| | | | | | | | | | CONSENSUS ZINC FINGER | FINGER, PROTEIN-DNA INTERACTION, |
| | | | | | | | | | PROTEIN; CHAIN: C, F, G;” | PROTEIN DESIGN, 2 CRYSTAL |
| | | | | | | | | | | STRUCTURE, COMPLEX (ZINC |
| | | | | | | | | | | FINGER/DNA)” |
| 470 | 1mey | G | 659 | 686 | 1.20E−12 | 0.57 | 1 | | “DNA; CHAIN: A, B, D, E; | “COMPLEX (ZINC FINGER/DNA) ZINC |
| | | | | | | | | | CONSENSUS ZINC FINGER | FINGER, PROTEIN-DNA INTERACTION, |
| | | | | | | | | | PROTEIN; CHAIN: C, F, G;” | PROTEIN DESIGN, 2 CRYSTAL |
| | | | | | | | | | | STRUCTURE, COMPLEX (ZINC |
| | | | | | | | | | | FINGER/DNA)” |
| 470 | 1mey | G | 203 | 229 | 8.50E−07 | 0.17 | 0.04 | | “DNA; CHAIN: A, B, D, E; | “COMPLEX (ZINC FINGER/DNA) ZINC |
| | | | | | | | | | CONSENSUS ZINC FINGER | FINGER, PROTEIN-DNA INTERACTION, |
| | | | | | | | | | PROTEIN; CHAIN: C, F, G;” | PROTEIN DESIGN, 2 CRYSTAL |
| | | | | | | | | | | STRUCTURE, COMPLEX (ZINC |
| | | | | | | | | | | FINGER/DNA” |
| 470 | 1mey | C | 605 | 687 | 1.70E−50 | | | 100.88 | “DNA; CHAIN: A, B, D, E; | “COMPLEX (ZINC FINGER/DNA ZINC |
| | | | | | | | | | CONSENSUS ZINC FINGER | FINGER, PROTEIN-DNA INTERACTION, |
| | | | | | | | | | PROTEIN; CHAIN: C, F, G;” | PROTEIN DESIGN, 2 CRYSTAL |
| | | | | | | | | | | STRUCTURE, COMPLEX (ZINC |
| | | | | | | | | | | FINGER/DNA)” |
| 470 | 1sp1 | | 205 | 233 | 0.0037 | −0.16 | 0.04 | | SP1F3; CHAIN: NULL; | “ZINC FINGER TRANSCRIPTION FACTOR |
| | | | | | | | | | | SP1; ZINC FINGER, TRANSCRIPTION |
| | | | | | | | | | | ACTIVATION, SP1” |
| 470 | 1tf3 | A | 178 | 245 | 5.10E−12 | −0.37 | 0.24 | | “TRANSCRIPTION FACTOR | “COMPLEX (TRANSCRIPTION |
| | | | | | | | | | IIIA; CHAIN: A; 5S RNA | REGULATION/DNA) TFIIIA; 5S GENE; |
| | | | | | | | | | GENE; CHAIN: E, F;” | NMR, TFIIIA, PROTEIN, DNA, |
| | | | | | | | | | | TRANSCRIPTION FACTOR, 5S RNA 2 |
| | | | | | | | | | | GENE, DNA BINDING PROTEIN, ZINC |
| | | | | | | | | | | FINGER, COMPLEX 3 (TRANSCRIPTION |
| | | | | | | | | | | REGULATION/DNA)” |
| 470 | 1tf6 | A | 494 | 646 | 1.00E−37 | −0.02 | 0.99 | | “TFIIIA; CHAIN: A, D; 5S | “COMPLEX (TRANSCRIPTION |
| | | | | | | | | | RIBOSOMAL RNA GENE; | REGULATION/DNA) COMPLEX |
| | | | | | | | | | CHAIN: B, C, E, F;” | (TRANSCRIPTION REGULATION/DNA), |
| | | | | | | | | | | RNA POLYMERASE III, 2 TRANSCRIPTION |
| | | | | | | | | | | INITIATION, ZINC FINGER PROTEIN” |
| 470 | 1tf6 | A | 522 | 668 | 3.40E−37 | 0.21 | 1 | | “TFIIIA; CHAIN: A, D; 5S | “COMPLEX (TRANSCRIPTION |
| | | | | | | | | | RIBOSOMAL RNA GENE; | REGULATION/DNA) COMPLEX |
| | | | | | | | | | CHAIN: B, C, E, F;” | (TRANSCRIPTION REGULATION/DNA), |
| | | | | | | | | | | RNA POLYMERASE III, 2 TRANSCRIPTION |
| | | | | | | | | | | INITIATION, ZINC FINGER PROTEIN” |
| 470 | 1tf6 | A | 438 | 583 | 8.50E−37 | −0.03 | 0.99 | | “TFIIIA; CHAIN: A, D; 5S | “COMPLEX (TRANSCRIPTION |
| | | | | | | | | | RIBOSOMAL RNA GENE; | REGULATION/DNA) COMPLEX |
| | | | | | | | | | CHAIN: B, C, E, F;” | (TRANSCRIPTION REGULATION/DNA), |
| | | | | | | | | | | RNA POLYMERASE III, 2 TRANSCRIPTION |
| | | | | | | | | | | INITIATION, ZINC FINGER PROTEIN” |
| 470 | 1tf6 | A | 326 | 471 | 5.10E−36 | 0.14 | 0.99 | | “TFIIIA; CHAIN: A, D; 5S | “COMPLEX (TRANSCRIPTION |
| | | | | | | | | | RIBOSOMAL RNA GENE; | REGULATION/DNA) COMPLEX |
| | | | | | | | | | CHAIN: B, C, E, F;” | (TRANSCRIPTION REGULATION/DNA), |
| | | | | | | | | | | RNA POLYMERASE III, 2 TRANSCRIPTION |
| | | | | | | | | | | INITIATION, ZINC FINGER PROTEIN” |
| 470 | 1tf6 | A | 550 | 686 | 5.10E−36 | 0.07 | 1 | | “TFIIIA; CHAIN: A, D; 5S | “COMPLEX (TRANSCRIPTION |
| | | | | | | | | | RIBOSOMAL RNA GENE; | REGULATION/DNA) COMPLEX |
| | | | | | | | | | CHAIN: B, C, E, F;” | (TRANSCRIPTION REGULATION/DNA), |
| | | | | | | | | | | RNA POLYMERASE III, 2 TRANSCRIPTION |
| | | | | | | | | | | INITIATION, ZINC FINGER PROTEIN” |
| 470 | 1tf6 | A | 255 | 415 | 1.50E−31 | 0.18 | 0.39 | | “TFIIIA; CHAIN: A, D; 5S | “COMPLEX (TRANSCRIPTION |
| | | | | | | | | | RIBOSOMAL RNA GENE; | REGULATION/DNA) COMPLEX |
| | | | | | | | | | CHAIN: B, C, E, F;” | (TRANSCRIPTION REGULATION/DNA), |
| | | | | | | | | | | RNA POLYMERASE III, 2 TRANSCRIPTION |
| | | | | | | | | | | INITIATION, ZINC FINGER PROTEIN” |
| 470 | 1tf6 | A | 178 | 331 | 3.40E−26 | −0.19 | 0.48 | | “TFIIIA; CHAIN: A, D; 5S | “COMPLEX (TRANSCRIPTION |
| | | | | | | | | | RIBOSOMAL RNA GENE; | REGULATION/DNA) COMPLEX |
| | | | | | | | | | CHAIN: B, C, E, F;” | (TRANSCRIPTION REGULATION/DNA), |
| | | | | | | | | | | RNA POLYMERASE III, 2 TRANSCRIPTION |
| | | | | | | | | | | INITIATION, ZINC FINGER PROTEIN” |
| 470 | 1tf6 | A | 437 | 599 | 1.00E−37 | | | 100.76 | “TFIIIA; CHAIN: A, D; 5S | “COMPLEX (TRANSCRIPTION |
| | | | | | | | | | RIBOSOMAL RNA GENE; | REGULATION/DNA) COMPLEX |
| | | | | | | | | | CHAIN: B, C, E, F;” | (TRANSCRIPTION REGULATION/DNA), |
| | | | | | | | | | | RNA POLYMERASE III, 2 TRANSCRIPTION |
| | | | | | | | | | | INITIATION, ZINC FINGER PROTEIN” |
| 470 | 1ubd | C | 575 | 686 | 6.30E−53 | 0.29 | 1 | | “YY1; CHAIN: C; ADENO- | “COMPLEX (TRANSCRIPTION |
| | | | | | | | | | ASSOCIATED VIRUS P5 | REGULATION/DNA) YING-YANG 1; |
| | | | | | | | | | INITIATOR ELEMENT DNA; | TRANSCRIPTION INITIATION, INITIATOR |
| | | | | | | | | | CHAIN: A, B;” | ELEMENT, YY1, ZINC 2 FINGER PROTEIN, |
| | | | | | | | | | | DNA-PROTEIN RECOGNITION, 3 |
| | | | | | | | | | | COMPLEX (TRANSCRIPTION |
| | | | | | | | | | | REGULATION/DNA)” |
| 470 | 1ubd | C | 353 | 462 | 8.40E−52 | 0.43 | 1 | | “YY1; CHAIN: C; ADENO- | “COMPLEX (TRANSCRIPTION |
| | | | | | | | | | ASSOCIATED VIRUS P5 | REGULATION/DNA) YING-YANG 1; |
| | | | | | | | | | INITIATOR ELEMENT DNA; | TRANSCRIPTION INITIATION, INITIATOR |
| | | | | | | | | | CHAIN: A, B;” | ELEMENT, YY1, ZINC 2 FINGER PROTEIN, |
| | | | | | | | | | | DNA-PROTEIN RECOGNITION, 3 |
| | | | | | | | | | | COMPLEX (TRANSCRIPTION |
| | | | | | | | | | | REGULATION/DNA)” |
| 470 | 1ubd | C | 463 | 574 | 6.30E−51 | 0.06 | 1 | | “YY1; CHAIN: C; ADENO- | “COMPLEX (TRANSCRIPTION |
| | | | | | | | | | ASSOCIATED VIRUS P5 | REGULATION/DNA) YING-YANG 1; |
| | | | | | | | | | INITIATOR ELEMENT DNA; | TRANSCRIPTION INITIATION, INITIATOR |
| | | | | | | | | | CHAIN: A, B;” | ELEMENT, YY1, ZINC 2 FINGER PROTEIN, |
| | | | | | | | | | | DNA-PROTEIN RECOGNITION, 3 |
| | | | | | | | | | | COMPLEX (TRANSCRIPTION |
| | | | | | | | | | | REGULATION/DNA)” |
| 470 | 1ubd | C | 407 | 518 | 4.20E−50 | 0.19 | 1 | | “YY1; CHAIN: C; ADENO- | “COMPLEX (TRANSCRIPTION |
| | | | | | | | | | ASSOCIATED VIRUS P5 | REGULATION/DNA) YING-YANG 1; |
| | | | | | | | | | INITIATOR ELEMENT DNA; | TRANSCRIPTION INITIATION, INITIATOR |
| | | | | | | | | | CHAIN: A, B;” | ELEMENT, YY1, ZINC 2 FINGER PROTEIN, |
| | | | | | | | | | | DNA-PROTEIN RECOGNITION, 3 |
| | | | | | | | | | | COMPLEX (TRANSCRIPTION |
| | | | | | | | | | | REGULATION/DNA)” |
| 470 | 1ubd | C | 549 | 658 | 1.50E−49 | 0.17 | 1 | | “YY1; CHAIN: C; ADENO- | “COMPLEX (TRANSCRIPTION |
| | | | | | | | | | ASSOCIATED VIRUS P5 | REGULATION/DNA) YING-YANG 1; |
| | | | | | | | | | INITIATOR ELEMENT DNA; | TRANSCRIPTION INITIATION, INITIATOR |
| | | | | | | | | | CHAIN: A, B;” | ELEMENT, YY1, ZINC 2 FINGER PROTEIN, |
| | | | | | | | | | | DNA-PROTEIN RECOGNITION, 3 |
| | | | | | | | | | | COMPLEX (TRANSCRIPTION |
| | | | | | | | | | | REGULATION/DNA)” |
| 470 | 1ubd | C | 295 | 434 | 4.20E−46 | 0.34 | 0.7 | | “YY1; CHAIN: C; ADENO- | “COMPLEX (TRANSCRIPTION |
| | | | | | | | | | ASSOCIATED VIRUS P5 | REGULATION/DNA) YING-YANG 1; |
| | | | | | | | | | INITIATOR ELEMENT DNA; | TRANSCRIPTION INITIATION, INITIATOR |
| | | | | | | | | | CHAIN: A, B;” | ELEMENT, YY1, ZINC 2 FINGER PROTEIN, |
| | | | | | | | | | | DNA-PROTEIN RECOGNITION, 3 |
| | | | | | | | | | | COMPLEX (TRANSCRIPTION |
| | | | | | | | | | | REGULATION/DNA)” |
| 470 | 1ubd | C | 585 | 686 | 1.70E−34 | 0.06 | 1 | | “YY1; CHAIN: C; ADENO- | “COMPLEX (TRANSCRIPTION |
| | | | | | | | | | ASSOCIATED VIRUS P5 | REGULATION/DNA) YING-YANG 1; |
| | | | | | | | | | INITIATOR ELEMENT DNA; | TRANSCRIPTION INITIATION, INITIATOR |
| | | | | | | | | | CHAIN: A, B;” | ELEMENT, YY1, ZINC 2 FINGER PROTEIN, |
| | | | | | | | | | | DNA-PROTEIN RECOGNITION, 3 |
| | | | | | | | | | | COMPLEX (TRANSCRIPTION |
| | | | | | | | | | | REGULATION/DNA)” |
| 470 | 1ubd | C | 557 | 658 | 5.10E−34 | 0.13 | 1 | | “YY1; CHAIN: C; ADENO- | “COMPLEX (TRANSCRIPTION |
| | | | | | | | | | ASSOCIATED VIRUS P5 | REGULATION/DNA) YING-YANG 1; |
| | | | | | | | | | INITIATOR ELEMENT DNA; | TRANSCRIPTION INITIATION, INITIATOR |
| | | | | | | | | | CHAIN: A, B;” | ELEMENT, YY1, ZINC 2 FINGER PROTEIN, |
| | | | | | | | | | | DNA-PROTEIN RECOGNITION, 3 |
| | | | | | | | | | | COMPLEX (TRANSCRIPTION |
| | | | | | | | | | | REGULATION/DNA)” |
| 470 | 1ubd | C | 361 | 462 | 6.80E−33 | 0.45 | 1 | | “YY1; CHAIN: C; ADENO- | “COMPLEX (TRANSCRIPTION |
| | | | | | | | | | ASSOCIATED VIRUS P5 | REGULATION/DNA) YING-YANG 1; |
| | | | | | | | | | INITIATOR ELEMENT DNA; | TRANSCRIPTION INITIATION, INITIATOR |
| | | | | | | | | | CHAIN: A, B;” | ELEMENT, YY1, ZINC 2 FINGER PROTEIN, |
| | | | | | | | | | | DNA-PROTEIN RECOGNITION, 3 |
| | | | | | | | | | | COMPLEX (TRANSCRIPTION |
| | | | | | | | | | | REGULATION/DNA)” |
| 470 | 1ubd | C | 299 | 406 | 6.80E−32 | 0.18 | 1 | | “YY1; CHAIN: C; ADENO- | “COMPLEX (TRANSCRIPTION |
| | | | | | | | | | ASSOCIATED VIRUS P5 | REGULATION/DNA) YING-YANG 1; |
| | | | | | | | | | INITIATOR ELEMENT DNA; | TRANSCRIPTION INITIATION, INITIATOR |
| | | | | | | | | | CHAIN: A, B;” | ELEMENT, YY1, ZINC 2 FINGER PROTEIN, |
| | | | | | | | | | | DNA-PROTEIN RECOGNITION, 3 |
| | | | | | | | | | | COMPLEX (TRANSCRIPTION |
| | | | | | | | | | | REGULATION/DNA)” |
| 470 | 1ubd | C | 262 | 378 | 1.20E−29 | 0.13 | 0.54 | | “YY1; CHAIN: C; ADENO- | “COMPLEX (TRANSCRIPTION |
| | | | | | | | | | ASSOCIATED VIRUS P5 | REGULATION/DNA) YING-YANG 1; |
| | | | | | | | | | INITIATOR ELEMENT DNA; | TRANSCRIPTION INITIATION, INITIATOR |
| | | | | | | | | | CHAIN: A, B;” | ELEMENT, YY1, ZINC 2 FINGER PROTEIN, |
| | | | | | | | | | | DNA-PROTEIN RECOGNITION, 3 |
| | | | | | | | | | | COMPLEX (TRANSCRIPTION |
| | | | | | | | | | | REGULATION/DNA)” |
| 470 | 1ubd | C | 249 | 406 | 2.10E−26 | −0.42 | 0.25 | | “YY1; CHAIN: C; ADENO- | “COMPLEX (TRANSCRIPTION |
| | | | | | | | | | ASSOCIATED VIRUS P5 | REGULATION/DNA) YING-YANG 1; |
| | | | | | | | | | INITIATOR ELEMENT DNA; | TRANSCRIPTION INITIATION, INITIATOR |
| | | | | | | | | | CHAIN: A, B;” | ELEMENT, YY1, ZINC 2 FINGER PROTEIN, |
| | | | | | | | | | | DNA-PROTEIN RECOGNITION, 3 |
| | | | | | | | | | | COMPLEX (TRANSCRIPTION |
| | | | | | | | | | | REGULATION/DNA)” |
| 470 | 1ubd | C | 185 | 279 | 3.40E−24 | −0.75 | 0.18 | | “YY1; CHAIN: C; ADENO- | “COMPLEX (TRANSCRIPTION |
| | | | | | | | | | ASSOCIATED VIRUS P5 | REGULATION/DNA) YING-YANG 1; |
| | | | | | | | | | INITIATOR ELEMENT DNA; | TRANSCRIPTION INITIATION, INITIATOR |
| | | | | | | | | | CHAIN: A, B;” | ELEMENT, YY1, ZINC 2 FINGER PROTEIN, |
| | | | | | | | | | | DNA-PROTEIN RECOGNITION, 3 |
| | | | | | | | | | | COMPLEX (TRANSCRIPTION |
| | | | | | | | | | | REGULATION/DNA)” |
| 470 | 1ubd | C | 327 | 435 | 8.40E−52 | | | 85.18 | “YY1; CHAIN: C; ADENO- | “COMPLEX (TRANSCRIPTION |
| | | | | | | | | | ASSOCIATED VIRUS P5 | REGULATION/DNA) YING-YANG 1; |
| | | | | | | | | | INITIATOR ELEMENT DNA; | TRANSCRIPTION INITIATION, INITIATOR |
| | | | | | | | | | CHAIN: A, B;” | ELEMENT, YY1, ZINC 2 FINGER PROTEIN, |
| | | | | | | | | | | DNA-PROTEIN RECOGNITION, 3 |
| | | | | | | | | | | COMPLEX (TRANSCRIPTION |
| | | | | | | | | | | REGULATION/DNA)” |
| 470 | 2adr | | 209 | 253 | 8.50E−09 | 0.05 | −0.18 | | ADR1; CHAIN: NULL; | “TRANSCRIPTION REGULATION |
| | | | | | | | | | | TRANSCRIPTION REGULATION, ADR1, |
| | | | | | | | | | | ZINC FINGER, NMR” |
| 470 | 2gli | A | 493 | 660 | 4.20E−68 | 0.19 | 1 | | “ZINC FINGER PROTEIN | “COMPLEX (DNA-BINDING |
| | | | | | | | | | GLI1; CHAIN: A; DNA; | PROTEIN/DNA) FIVE-FINGER GLI; GLI, |
| | | | | | | | | | CHAIN: C, D;” | ZINC FINGER, COMPLEX (DNA-BINDING |
| | | | | | | | | | | PROTEIN/DNA)” |
| 470 | 2gli | A | 438 | 603 | 8.40E−67 | 0.03 | 1 | | “ZINC FINGER PROTEIN | “COMPLEX (DNA-BINDING |
| | | | | | | | | | GLI1; CHAIN: A; DNA; | PROTEIN/DNA) FIVE-FINGER GLI; GLI, |
| | | | | | | | | | CHAIN: C, D;” | ZINC FINGER, COMPLEX (DNA-BINDING |
| | | | | | | | | | | PROTEIN/DNA)” |
| 470 | 2gli | A | 381 | 520 | 2.10E−65 | 0.12 | 1 | | “ZINC FINGER PROTEIN | “COMPLEX (DNA-BINDING |
| | | | | | | | | | GLI1; CHAIN: A; DNA; | PROTEIN/DNA) FIVE-FINGER GLI; GLI, |
| | | | | | | | | | CHAIN: C, D;” | ZINC FINGER, COMPLEX (DNA-BINDING |
| | | | | | | | | | | PROTEIN/DNA)” |
| 470 | 2gli | A | 298 | 435 | 1.90E−54 | 0.32 | 0.99 | | “ZINC FINGER PROTEIN | “COMPLEX (DNA-BINDING |
| | | | | | | | | | GLI1; CHAIN: A; DNA; | PROTEIN/DNA) FIVE-FINGER GLI; GLI, |
| | | | | | | | | | CHAIN: C, D;” | ZINC FINGER, COMPLEX (DNA-BINDING |
| | | | | | | | | | | PROTEIN/DNA)” |
| 470 | 2gli | A | 529 | 657 | 6.80E−34 | 0.28 | 1 | | “ZINC FINGER PROTEIN | “COMPLEX (DNA-BINDING |
| | | | | | | | | | GLI1; CHAIN: A; DNA; | PROTEIN/DNA) FIVE-FINGER GLI; GLI, |
| | | | | | | | | | CHAIN: C, D;” | ZINC FINGER, COMPLEX (DNA-BINDING |
| | | | | | | | | | | PROTEIN/DNA)” |
| 470 | 2gli | A | 557 | 685 | 1.00E−33 | −0.09 | 1 | | “ZINC FINGER PROTEIN | “COMPLEX (DNA-BINDING |
| | | | | | | | | | GLI1; CHAIN: A; DNA; | PROTEIN/DNA) FIVE-FINGER GLI; GLI, |
| | | | | | | | | | CHAIN: C, D;” | ZINC FINGER, COMPLEX (DNA-BINDING |
| | | | | | | | | | | PROTEIN/DNA)” |
| 470 | 2gli | A | 325 | 461 | 3.40E−33 | 0.28 | 0.78 | | “ZINC FINGER PROTEIN | “COMPLEX (DNA-BINDING |
| | | | | | | | | | GLI1; CHAIN: A; DNA; | PROTEIN/DNA) FIVE-FINGER GLI; GLI, |
| | | | | | | | | | CHAIN: C, D;” | ZINC FINGER, COMPLEX (DNA-BINDING |
| | | | | | | | | | | PROTEIN/DNA)” |
| 470 | 2gli | A | 232 | 377 | 6.80E−28 | 0.17 | 0.69 | | “ZINC FINGER PROTEIN | “COMPLEX (DNA-BINDING |
| | | | | | | | | | GLI1; CHAIN: A; DNA; | PROTEIN/DNA) FIVE-FINGER GLI; GLI, |
| | | | | | | | | | CHAIN: C, D;” | ZINC FINGER, COMPLEX (DNA-BINDING |
| | | | | | | | | | | PROTEIN/DNA)” |
| 470 | 2gli | A | 216 | 408 | 1.50E−26 | −0.2 | 0.13 | | “ZINC FINGER PROTEIN | “COMPLEX (DNA-BINDING |
| | | | | | | | | | GLI1; CHAIN: A; DNA; | PROTEIN/DNA) FIVE-FINGER GLI; GLI, |
| | | | | | | | | | CHAIN: C, D;” | ZINC FINGER, COMPLEX (DNA-BINDING |
| | | | | | | | | | | PROTEIN/DNA)” |
| 470 | 2gli | A | 325 | 464 | 2.10E−65 | | | 87.39 | “ZINC FINGER PROTEIN | “COMPLEX (DNA-BINDING |
| | | | | | | | | | GLI1; CHAIN: A; DNA; | PROTEIN/DNA) FIVE-FINGER GLI; GLI, |
| | | | | | | | | | CHAIN: C, D;” | ZINC FINGER, COMPLEX (DNA-BINDING |
| | | | | | | | | | | PROTEIN/DNA)” |
| 471 | 1a05 | A | 56 | 395 | 1.40E−92 | 0.3 | 1 | | “3-ISOPROPYLMALATE | “OXIDOREDUCTASE IPMDH, IMDH; |
| | | | | | | | | | DEHYDROGENASE; CHAIN: | OXIDOREDUCTASE, DECARBOXYLATING |
| | | | | | | | | | A, B;” | DEHYDROGENASE, LEUCINE 2 |
| | | | | | | | | | | BIOSYNTHESIS” |
| 471 | 1a05 | A | 54 | 394 | 1.40E−92 | | | 159.71 | “3-ISOPROPYLMALATE | “OXIDOREDUCTASE IPMDH, IMDII; |
| | | | | | | | | | DEHYDROGENASE; CHAIN: | OXIDOREDUCTASE, DECARBOXYLATING |
| | | | | | | | | | A, B;” | DEHYDROGENASE, LEUCINE 2 |
| | | | | | | | | | | BIOSYNTHESIS” |
| 471 | 1ai2 | | 54 | 395 | 8.40E−88 | 0.44 | 1 | | ISOCITRATE | “OXIDOREDUCTASE OXALOSUCCINATE |
| | | | | | | | | | DEHYDROGENASE; CHAIN: | DECARBOXYLASE, IDH; |
| | | | | | | | | | NULL, | OXIDOREDUCTASE (NAD(A)-CHOH(D)), |
| | | | | | | | | | | NADP, PHOSPHORYLATION, 2 |
| | | | | | | | | | | GLYOXYLATE BYPASS” |
| 471 | 1ai2 | | 30 | 392 | 8.40E−88 | | | 124.43 | ISOCITRATE | “OXIDOREDUCTASE OXALOSUCCINATE |
| | | | | | | | | | DEHYDROGENASE; CHAIN: | DECARBOXYLASE, IDH; |
| | | | | | | | | | NULL; | OXIDOREDUCTASE (NAD(A)-CHOH(D)), |
| | | | | | | | | | | NADP, PHOSPHORYLATION, 2 |
| | | | | | | | | | | GLYOXYLATE BYPASS” |
| 471 | 1cm7 | A | 55 | 395 | 1.10E−86 | 0.4 | 1 | | “3-ISOPROPYLMALATE | “OXIDOREDUCTASE IPMDH, IMDH; |
| | | | | | | | | | DEHYDROGENASE; CHAIN: | OXIDOREDUCTASE, DEHYDROGENASE, |
| | | | | | | | | | A, B;” | NAD-DEPENDANT ENZYME, 2 LEUCINE |
| | | | | | | | | | | BIOSYNTHETIC PATHWAY” |
| 471 | 1cm7 | A | 51 | 401 | 1.10E−86 | | | 160.94 | “3-ISOPROPYLMALATE | “OXIDOREDUCTASE IPMDH, IMDH; |
| | | | | | | | | | DEHYDROGENASE; CHAIN: | OXIDOREDUCTASE, DEHYDROGENASE, |
| | | | | | | | | | A, B;” | NAD-DEPENDANT ENZYME, 2 LEUCINE |
| | | | | | | | | | | BIOSYNTHETIC PATHWAY” |
| 471 | 1idm | | 57 | 395 | 7.00E−90 | 0.41 | 1 | | 3-ISOPROPYLMALATE | “OXIDOREDUCTASE IPMDH; 1IDM 7 |
| | | | | | | | | | DEHYDROGENASE; 1IDM 5 | CHIMERA 1IDM 20 |
| | | | | | | | | | CHAIN: NULL; 1IDM 6 | |
| 471 | 1idm | | 55 | 396 | 7.00E−90 | | | 165.49 | 3-ISOPROPYLMALATE | “OXIDOREDUCTASE IPMDH; 1IDM 7 |
| | | | | | | | | | DEHYDROGENASE; 1IDM 5 | CHIMERA 1IDM 20 |
| | | | | | | | | | CHAIN: NULL; 1IDM 6 | |
| 471 | 1xac | | 57 | 395 | 8.40E−87 | 0.48 | 1 | | 3-ISOPROPYLMALATE | “OXIDOREDUCTASE IPMDH, IMDH; 1XAC |
| | | | | | | | | | DEHYDROGENASE 2T2M6T | 10 OXIDOREDUCTASE, CHIMERA 1XAC |
| | | | | | | | | | S82R; 1XAC 8 CHAIN: NULL; | 21” |
| | | | | | | | | | 1XAC 9 | |
| 471 | 1xac | | 55 | 396 | 8.40E−87 | | | 159.36 | 3-ISOPROPYLMALATE | “OXIDOREDUCTASE IPMDH, IMDH; 1XAC |
| | | | | | | | | | DEHYDROGENASE 2T2M6T | 10 OXIDOREDUCTASE, CHIMERA 1XAC |
| | | | | | | | | | S82R; 1XAC 8 CHAIN: NULL; | 21” |
| | | | | | | | | | 1XAC 9 | |
| 471 | 2ayq | A | 54 | 395 | 1.40E−96 | 0.63 | 1 | | “3-ISOPROPYLMALATE | “OXIDOREDUCTASE OXIDOREDUCTASE, |
| | | | | | | | | | DEHYDROGENASE; CHAIN: | 3-ISOPROPYLMALATE |
| | | | | | | | | | A, B;” | DEHYDROGENASE, LEUCINE 2 |
| | | | | | | | | | | BIOSYNTHESIS, MODERATE |
| | | | | | | | | | | THERMOPHILE” |
| 471 | 2ayq | A | 54 | 396 | 1.40E−96 | | | 154.13 | “3-ISOPROPYLMALATE | “OXIDOREDUCTASE OXIDOREDUCTASE, |
| | | | | | | | | | DEHYDROGENASE; CHAIN: | 3-ISOPROPYLMALATE |
| | | | | | | | | | A, B;” | DEHYDROGENASE, LEUCINE 2 |
| | | | | | | | | | | BIOSYNTHESIS, MODERATE |
| | | | | | | | | | | THERMOPHILE” |
| 472 | 1alh | A | 240 | 320 | 1.70E−29 | −0.15 | 0.75 | | “QGSR ZINC FINGER | “COMPLEX (ZINC FINGER/DNA) |
| | | | | | | | | | PEPTIDE; CHAIN: A; | COMPLEX (ZINC FINGER/DNA), ZINC |
| | | | | | | | | | DUPLEX | FINGER, DNA-BINDING PROTEIN” |
| | | | | | | | | | OLIGONUCLEOTIDE | |
| | | | | | | | | | BINDING SITE; CHAIN: B, | |
| | | | | | | | | | C;” | |
| 472 | 1alh | A | 212 | 292 | 3.40E−29 | −0.22 | 0.3 | | “QGSR ZINC FINGER | “COMPLEX (ZINC FINGER/DNA) |
| | | | | | | | | | PEPTIDE; CHAIN: A; | COMPLEX (ZINC FINGER/DNA), ZINC |
| | | | | | | | | | DUPLEX | FINGER, DNA-BINDING PROTEIN” |
| | | | | | | | | | OLIGONUCLEOTIDE | |
| | | | | | | | | | BINDING SITE; CHAIN; B, | |
| | | | | | | | | | C;” | |
| 472 | 1alh | A | 352 | 460 | 3.40E−27 | 0 | 0.49 | | “QGSR ZINC FINGER | “COMPLEX (ZINC FINGER/DNA) |
| | | | | | | | | | PEPTIDE; CHAIN: A; | COMPLEX (ZINC FINGER/DNA), ZINC |
| | | | | | | | | | DUPLEX | FINGER, DNA-BINDING PROTEIN” |
| | | | | | | | | | OLIGONUCLEOTIDE | |
| | | | | | | | | | BINDING SITE; CHAIN: B, | |
| | | | | | | | | | C;” | |
| 472 | 1alh | A | 519 | 594 | 8.50E−27 | −0.27 | 0.12 | | “QGSR ZINC FINGER | “COMPLEX (ZINC FINGER/DNA) |
| | | | | | | | | | PEPTIDE; CHAIN: A; | COMPLEX (ZINC FINGER/DNA), ZINC |
| | | | | | | | | | DUPLEX | FINGER, DNA-BINDING PROTEIN” |
| | | | | | | | | | OLIGONUCLEOTIDE | |
| | | | | | | | | | BINDING SITE; CHAIN: B, | |
| | | | | | | | | | C;” | |
| 472 | 1alh | A | 380 | 490 | 3.40E−23 | −0.37 | 0.23 | | “QGSR ZINC FINGER | “COMPLEX (ZINC FINGER/DNA) |
| | | | | | | | | | PEPTIDE; CHAIN: A; | COMPLEX (ZINC FINGER/DNA), ZINC |
| | | | | | | | | | DUPLEX | FINGER, DNA-BINDING PROTEIN” |
| | | | | | | | | | OLIGONUCLEOTIDE | |
| | | | | | | | | | BINDING SITE; CHAIN: B, | |
| | | | | | | | | | C;” | |
| 472 | 1alh | A | 241 | 349 | 4.20E−23 | −0.04 | 0.09 | | “QGSR ZINC FINGER | “COMPLEX (ZINC FINGER/DNA) |
| | | | | | | | | | PEPTIDE; CHAIN: A; | COMPLEX (ZINC FINGER/DNA), ZINC |
| | | | | | | | | | DUPLEX | FINGER, DNA-BINDING PROTEIN” |
| | | | | | | | | | OLIGONUCLEOTIDE | |
| | | | | | | | | | BINDING SITE; CHAIN: B, | |
| | | | | | | | | | C;” | |
| 472 | 1mey | C | 323 | 404 | 3.40E−51 | 0.33 | 0.99 | | “DNA; CHAIN: A, B, D, E; | “COMPLEX (ZINC FINGER/DNA) ZINC |
| | | | | | | | | | CONSENSUS ZINC FINGER | FINGER, PROTEIN-DNA INTERACTION, |
| | | | | | | | | | PROTEIN; CHAIN: C, F, G;” | PROTEIN DESIGN, 2 CRYSTAL |
| | | | | | | | | | | STRUCTURE, COMPLEX (ZINC |
| | | | | | | | | | | FINGER/DNA)” |
| 472 | 1mey | C | 295 | 376 | 1.00E−50 | 0.12 | 0.98 | | “DNA; CHAIN: A, B, D, E; | “COMPLEX (ZINC FINGER/DNA) ZINC |
| | | | | | | | | | CONSENSUS ZINC FINGER | FINGER, PROTEIN-DNA INTERACTION, |
| | | | | | | | | | PROTEIN; CHAIN: C, F, G;” | PROTEIN DESIGN, 2 CRYSTAL |
| | | | | | | | | | | STRUCTURE, COMPLEX (ZINC |
| | | | | | | | | | | FINGER/DNA)” |
| 472 | 1mey | C | 267 | 348 | 3.40E−50 | 0.14 | 1 | | “DNA; CHAIN: A, B, D, E; | “COMPLEX (ZINC FINGER/DNA) ZINC |
| | | | | | | | | | CONSENSUS ZINC FINGER | FINGER, PROTEIN-DNA INTERACTION, |
| | | | | | | | | | PROTEIN; CHAIN: C, F, G;” | PROTEIN DESIGN, 2 CRYSTAL |
| | | | | | | | | | | STRUCTURE, COMPLEX (ZINC |
| | | | | | | | | | | FINGER/DNA)” |
| 472 | 1mey | C | 239 | 320 | 1.20E−49 | −0.16 | 0.96 | | “DNA; CHAIN: A, B, D, E; | “COMPLEX (ZINC FINGER/DNA) ZINC |
| | | | | | | | | | CONSENSUS ZINC FINGER | FINGER, PROTEIN-DNA INTERACTION, |
| | | | | | | | | | PROTEIN; CHAIN: C, F, G;” | PROTEIN DESIGN, 2 CRYSTAL |
| | | | | | | | | | | STRUCTURE, COMPLEX (ZINC |
| | | | | | | | | | | FINGER/DNA)” |
| 472 | 1mey | C | 211 | 292 | 1.00E−48 | −0.08 | 0.78 | | “DNA; CHAIN: A, B, D, E; | “COMPLEX (ZINC FINGER/DNA) ZINC |
| | | | | | | | | | CONSENSUS ZINC FINGER | FINGER, PROTEIN-DNA INTERACTION, |
| | | | | | | | | | PROTEIN; CHAIN: C, F, G;” | PROTEIN DESIGN, 2 CRYSTAL |
| | | | | | | | | | | STRUCTURE, COMPLEX (ZINC |
| | | | | | | | | | | FINGER/DNA)” |
| 472 | 1mey | C | 183 | 264 | 1.20E−45 | −0.29 | 0.04 | | “DNA; CHAIN: A, B, D, E; | “COMPLEX (ZINC FINGER/DNA) ZINC |
| | | | | | | | | | CONSENSUS ZINC FINGER | FINGER, PROTEIN-DNA INTERACTION, |
| | | | | | | | | | PROTEIN; CHAIN: C, F, G;” | PROTEIN DESIGN, 2 CRYSTAL |
| | | | | | | | | | | STRUCTURE, COMPLEX (ZINC |
| | | | | | | | | | | FINGER/DNA)” |
| 472 | 1mey | C | 518 | 594 | 3.40E−44 | −0.46 | 0.06 | | “DNA; CHAIN: A, B, D, E; | “COMPLEX (ZINC FINGER/DNA) ZINC |
| | | | | | | | | | CONSENSUS ZINC FINGER | FINGER, PROTEIN-DNA INTERACTION, |
| | | | | | | | | | PROTEIN; CHAIN: C, F, G;” | PROTEIN DESIGN, 2 CRYSTAL |
| | | | | | | | | | | STRUCTURE, COMPLEX (ZINC |
| | | | | | | | | | | FINGER/DNA)” |
| 472 | 1mey | C | 351 | 432 | 1.00E−42 | 0.08 | 0.98 | | “DNA; CHAIN: A, B, D, E; | “COMPLEX (ZINC FINGER/DNA) ZINC |
| | | | | | | | | | CONSENSUS ZINC FINGER | FINGER, PROTEIN-DNA INTERACTION, |
| | | | | | | | | | PROTEIN; CHAIN: C, F, G;” | PROTEIN DESIGN, 2 CRYSTAL |
| | | | | | | | | | | STRUCTURE, COMPLEX (ZINC |
| | | | | | | | | | | FINGER/DNA)” |
| 472 | 1mey | C | 379 | 490 | 3.40E−42 | −0.2 | 0.9 | | “DNA; CHAIN: A, B, D, E; | “COMPLEX (ZINC FINGER/DNA) ZINC |
| | | | | | | | | | CONSENSUS ZINC FINGER | FINGER, PROTEIN-DNA INTERACTION, |
| | | | | | | | | | PROTEIN; CHAIN: C, F, G;” | PROTEIN DESIGN, 2 CRYSTAL |
| | | | | | | | | | | STRUCTURE, COMPLEX (ZINC |
| | | | | | | | | | | FINGER/DNA)” |
| 472 | 1mey | C | 547 | 599 | 3.40E−29 | −0.49 | 0.39 | | “DNA CHAIN: A, B, D, E; | “COMPLEX (ZINC FINGER/DNA) ZINC |
| | | | | | | | | | CONSENSUS ZINC FINGER | FINGER, PROTEIN-DNA INTERACTION, |
| | | | | | | | | | PROTEIN; CHAIN: C, F, G;” | PROTEIN DESIGN, 2 CRYSTAL |
| | | | | | | | | | | STRUCTURE, COMPLEX (ZINC |
| | | | | | | | | | | FINGER/DNA)” |
| 472 | 1mey | G | 433 | 460 | 3.40E−13 | 0.59 | 1 | | “DNA; CHAIN: A, B, D, E; | “COMPLEX (ZINC FINGER/DNA) ZINC |
| | | | | | | | | | CONSENSUS ZINC FINGER | FINGER, PROTEIN-DNA INTERACTION, |
| | | | | | | | | | PROTEIN; CHAIN: C, F, G;” | PROTEIN DESIGN, 2 CRYSTAL |
| | | | | | | | | | | STRUCTURE, COMPLEX (ZINC |
| | | | | | | | | | | FINGER/DNA)” |
| 472 | 1mey | C | 379 | 461 | 1.00E−42 | | | 95.61 | “DNA; CHAIN: A, B, D, E; | “COMPLEX (ZINC FINGER/DNA) ZINC |
| | | | | | | | | | CONSENSUS ZINC FINGER | FINGER, PROTEIN-DNA INTERACTION, |
| | | | | | | | | | PROTEIN; CHAIN: C, F, G;” | PROTEIN DESIGN, 2 CRYSTAL |
| | | | | | | | | | | STRUCTURE, COMPLEX (ZINC |
| | | | | | | | | | | FINGER/DNA)” |
| 472 | 1tf6 | A | 240 | 385 | 6.80E−37 | −0.26 | 0.54 | | “TFIIIA; CHAIN: A, D; 5S | “COMPLEX (TRANSCRIPTION |
| | | | | | | | | | RIBOSOMAL RNA GENE; | REGULATION/DNA) COMPLEX |
| | | | | | | | | | CHAIN: B, C, E, F;” | (TRANSCRIPTION REGULATION/DNA), |
| | | | | | | | | | | RNA POLYMERASE III, 2 TRANSCRIPTION |
| | | | | | | | | | | INITIATION, ZINC FINGER PROTEIN” |
| 472 | 1tf6 | A | 184 | 329 | 3.40E−35 | −0.07 | 0.05 | | “TFIIIA; CHAIN: A, D; 5S | “COMPLEX (TRANSCRIPTION |
| | | | | | | | | | RIBOSOMAL RNA GENE; | REGULATION/DNA) COMPLEX |
| | | | | | | | | | CHAIN: B, C, E, F;” | (TRANSCRIPTION REGULATION/DNA), |
| | | | | | | | | | | RNA POLYMERASE III, 2 TRANSCRIPTION |
| | | | | | | | | | | INITIATION, ZINC FINGER PROTEIN” |
| 472 | 1tf6 | A | 352 | 497 | 1.20E−34 | −0.23 | 0.11 | | “TFIIIA; CHAIN: A, D; 5S | “COMPLEX (TRANSCRIPTION |
| | | | | | | | | | RIBOSOMAL RNA GENE; | REGULATION/DNA) COMPLEX |
| | | | | | | | | | CHAIN: B, C, E, F;” | (TRANSCRIPTION REGULATION/DNA), |
| | | | | | | | | | | RNA POLYMERASE III, 2 TRANSCRIPTION |
| | | | | | | | | | | INITIATION, ZINC FINGER PROTEIN” |
| 472 | 1tf6 | A | 323 | 492 | 1.20E−34 | | | 82.32 | “TFIIIA; CHAIN: A, D; 5S | “COMPLEX (TRANSCRIPTION |
| | | | | | | | | | RIBOSOMAL RNA GENE; | REGULATION/DNA) COMPLEX |
| | | | | | | | | | CHAIN: B, C, E, F;” | (TRANSCRIPTION REGULATION/DNA), |
| | | | | | | | | | | RNA POLYMERASE III, 2 TRANSCRIPTION |
| | | | | | | | | | | INITIATION, ZINC FINGER PROTEIN” |
| 472 | 1ubd | C | 349 | 460 | 6.30E−50 | 0.32 | 1 | | “YY1; CHAIN: C; ADENO- | “COMPLEX (TRANSCRIPTION |
| | | | | | | | | | ASSOCIATED VIRUS P5 | REGULATION/DNA) YING-YANG 1; |
| | | | | | | | | | INITIATOR ELEMENT DNA; | TRANSCRIPTION INITIATION, INITIATOR |
| | | | | | | | | | CHAIN: A, B;” | ELEMENT, YY1, ZINC 2 FINGER PROTEIN, |
| | | | | | | | | | | DNA-PROTEIN RECOGNITION, 3 |
| | | | | | | | | | | COMPLEX (TRANSCRIPTION |
| | | | | | | | | | | REGULATION/DNA)” |
| 472 | 1ubd | C | 303 | 404 | 3.40E−35 | 0.03 | 0.83 | | “YY1; CHAIN: C; ADENO- | “COMPLEX (TRANSCRIPTION |
| | | | | | | | | | ASSOCIATED VIRUS P5 | REGULATION/DNA) YING-YANG 1; |
| | | | | | | | | | INITIATOR ELEMENT DNA; | TRANSCRIPTION INITIATION, INITIATOR |
| | | | | | | | | | CHAIN: A, B;” | ELEMENT, YY1, ZINC 2 FINGER PROTEIN, |
| | | | | | | | | | | DNA-PROTEIN RECOGNITION, 3 |
| | | | | | | | | | | COMPLEX (TRANSCRIPTION |
| | | | | | | | | | | REGULATION/DNA)” |
| 472 | 1ubd | C | 275 | 376 | 1.00E−34 | −0.09 | 0.49 | | “YY1; CHAIN: C; ADENO- | “COMPLEX (TRANSCRIPTION |
| | | | | | | | | | ASSOCIATED VIRUS P5 | REGULATION/DNA) YING-YANG 1; |
| | | | | | | | | | INITIATOR ELEMENT DNA; | TRANSCRIPTION INITIATION, INITIATOR |
| | | | | | | | | | CHAIN: A, B;” | ELEMENT, YY1, ZINC 2 FINGER PROTEIN, |
| | | | | | | | | | | DNA-PROTEIN RECOGNITION, 3 |
| | | | | | | | | | | COMPLEX (TRANSCRIPTION |
| | | | | | | | | | | REGULATION/DNA)” |
| 472 | 1ubd | C | 247 | 348 | 1.00E−33 | −0.02 | 0.22 | | “YY1; CHAIN: C; ADENO- | “COMPLEX (TRANSCRIPTION |
| | | | | | | | | | ASSOCIATED VIRUS P5 | REGULATION/DNA) YING-YANG 1; |
| | | | | | | | | | INITIATOR ELEMENT DNA; | TRANSCRIPTION INITIATION, INITIATOR |
| | | | | | | | | | CHAIN: A, B;” | ELEMENT, YY1, ZINC 2 FINGER PROTEIN, |
| | | | | | | | | | | DNA-PROTEIN RECOGNITION, 3 |
| | | | | | | | | | | COMPLEX (TRANSCRIPTION |
| | | | | | | | | | | REGULATION/DNA)” |
| 472 | 1ubd | C | 219 | 320 | 1.40E−33 | −0.26 | 0.58 | | “YY1; CHAIN: C; ADENO- | “COMPLEX (TRANSCRIPTION |
| | | | | | | | | | ASSOCIATED VIRUS P5 | REGULATION/DNA) YING-YANG 1; |
| | | | | | | | | | INITIATOR ELEMENT DNA; | TRANSCRIPTION INITIATION, INITIATOR |
| | | | | | | | | | CHAIN: A, B;” | ELEMENT, YY1, ZINC 2 FINGER PROTEIN, |
| | | | | | | | | | | DNA-PROTEIN RECOGNITION, 3 |
| | | | | | | | | | | COMPLEX (TRANSCRIPTION |
| | | | | | | | | | | REGULATION/DNA)” |
| 472 | 1ubd | C | 244 | 404 | 1.10E−32 | −0.48 | 0.01 | | “YY1; CHAIN: C; ADENO- | “COMPLEX (TRANSCRIPTION |
| | | | | | | | | | ASSOCIATED VIRUS P5 | REGULATION/DNA) YING-YANG 1; |
| | | | | | | | | | INITIATOR ELEMENT DNA; | TRANSCRIPTION INITIATION, INITIATOR |
| | | | | | | | | | CHAIN: A, B;” | ELEMENT, YY1, ZINC 2 FINGER PROTEIN, |
| | | | | | | | | | | DNA-PROTEIN RECOGNITION, 3 |
| | | | | | | | | | | COMPLEX (TRANSCRIPTION |
| | | | | | | | | | | REGULATION/DNA)” |
| 472 | 1ubd | C | 191 | 292 | 1.20E−32 | −0.15 | 0.22 | | “YY1; CHAIN: C; ADENO- | “COMPLEX (TRANSCRIPTION |
| | | | | | | | | | ASSOCIATED VIRUS P5 | REGULATION/DNA) YING-YANG 1; |
| | | | | | | | | | INITIATOR ELEMENT DNA; | TRANSCRIPTION INITIATION, INITIATOR |
| | | | | | | | | | CHAIN: A, B;” | ELEMENT, YY1, ZINC 2 FINGER PROTEIN, |
| | | | | | | | | | | DNA-PROTEIN RECOGNITION, 3 |
| | | | | | | | | | | COMPLEX (TRANSCRIPTION |
| | | | | | | | | | | REGULATION/DNA)” |
| 472 | 1ubd | C | 359 | 460 | 8.50E−29 | 0.2 | 1 | | “YY1; CHAIN: C; ADENO- | “COMPLEX (TRANSCRIPTION |
| | | | | | | | | | ASSOCIATED VIRUS P5 | REGULATION/DNA) YING-YANG 1; |
| | | | | | | | | | INITIATOR ELEMENT DNA; | TRANSCRIPTION INITIATION, INITIATOR |
| | | | | | | | | | CHAIN: A, B;” | ELEMENT, YY1, ZINC 2 FINGER PROTEIN, |
| | | | | | | | | | | DNA-PROTEIN RECOGNITION, 3 |
| | | | | | | | | | | COMPLEX (TRANSCRIPTION |
| | | | | | | | | | | REGULATION/DNA)” |
| 472 | 1ubd | C | 219 | 348 | 6.30E−25 | −0.01 | 0.18 | | “YY1; CHAIN: C; ADENO- | “COMPLEX (TRANSCRIPTION |
| | | | | | | | | | ASSOCIATED VIRUS P5 | REGULATION/DNA) YING-YANG 1; |
| | | | | | | | | | INITIATOR ELEMENT DNA; | TRANSCRIPTION INITIATION, INITIATOR |
| | | | | | | | | | CHAIN: A, B;” | ELEMENT, YY1, ZINC 2 FINGER PROTEIN, |
| | | | | | | | | | | DNA-PROTEIN RECOGNITION, 3 |
| | | | | | | | | | | COMPLEX (TRANSCRIPTION |
| | | | | | | | | | | REGULATION/DNA)” |
| 472 | 1ubd | C | 527 | 599 | 6.80E−22 | −0.63 | 0.16 | | “YY1; CHAIN: C; ADENO- | “COMPLEX (TRANSCRIPTION |
| | | | | | | | | | ASSOCIATED VIRUS P5 | REGULATION/DNA) YING-YANG 1; |
| | | | | | | | | | INITIATOR ELEMENT DNA; | TRANSCRIPTION INITIATION, INITIATOR |
| | | | | | | | | | CHAIN: A, B;” | ELEMENT, YY1, ZINC 2 FINGER PROTEIN, |
| | | | | | | | | | | DNA-PROTEIN RECOGNITION, 3 |
| | | | | | | | | | | COMPLEX (TRANSCRIPTION |
| | | | | | | | | | | REGULATION/DNA)” |
| 472 | 1ubd | C | 353 | 461 | 6.30E−50 | | | 75.48 | “YY1; CHAIN: C; ADENO- | “COMPLEX (TRANSCRIPTION |
| | | | | | | | | | ASSOCIATED VIRUS P5 | REGULATION/DNA) YING-YANG 1; |
| | | | | | | | | | INITIATOR ELEMENT DNA; | TRANSCRIPTION INITIATION, INITIATOR |
| | | | | | | | | | CHAIN: A, B;” | ELEMENT, YY1, ZINC 2 FINGER PROTEIN, |
| | | | | | | | | | | DNA-PROTEIN RECOGNITION, 3 |
| | | | | | | | | | | COMPLEX (TRANSCRIPTION |
| | | | | | | | | | | REGULATION/DNA)” |
| 472 | 2gli | A | 325 | 462 | 6.30E−64 | 0.17 | 0.96 | | “ZINC FINGER PROTEIN | “COMPLEX (DNA-BINDING |
| | | | | | | | | | GLI1; CHAIN: A; DNA; | PROTEIN/DNA) FIVE-FINGER GLI; GLI, |
| | | | | | | | | | CHAIN: C, D;” | ZINC FINGER, COMPLEX (DNA-BINDING |
| | | | | | | | | | | PROTEIN/DNA)” |
| 472 | 2gli | A | 380 | 571 | 1.50E−47 | −0.14 | 0.43 | | “ZINC FINGER PROTEIN | “COMPLEX (DNA-BINDING |
| | | | | | | | | | GLI1; CHAIN: A; DNA; | PROTEIN/DNA) FIVE-FINGER GLI; GLI, |
| | | | | | | | | | CHAIN: C, D;” | ZINC FINGER, COMPLEX (DNA-BINDING |
| | | | | | | | | | | PROTEIN/DNA)” |
| 472 | 2gli | A | 211 | 406 | 1.30E−34 | −0.24 | 0.28 | | “ZINC FINGER PROTEIN | “COMPLEX (DNA-BINDING |
| | | | | | | | | | GLI1; CHAIN: A; DNA; | PROTEIN/DNA) FIVE-FINGER GLI; GLI, |
| | | | | | | | | | CHAIN: C, D;” | ZINC FINGER, COMPLEX (DNA-BINDING |
| | | | | | | | | | | PROTEIN/DNA)” |
| 472 | 2gli | A | 275 | 403 | 1.40E−33 | −0.17 | 0.66 | | “ZINC FINGER PROTEIN | “COMPLEX (DNA-BINDING |
| | | | | | | | | | GLI1; CHAIN: A; DNA; | PROTEIN/DNA) FIVE-FINGER GLI GLI, |
| | | | | | | | | | CHAIN: C, D;” | ZINC FINGER, COMPLEX (DNA-BINDING |
| | | | | | | | | | | PROTEIN/DNA)” |
| 472 | 2gli | A | 183 | 319 | 1.70E−33 | −0.1 | 0.01 | | “ZINC FINGER PROTEIN | “COMPLEX (DNA-BINDING |
| | | | | | | | | | GLI1; CHAIN: A; DNA; | PROTEIN/DNA) FIVE-FINGER GLI; GLI, |
| | | | | | | | | | CHAIN: C, D;” | ZINC FINGER, COMPLEX (DNA-BINDING |
| | | | | | | | | | | PROTEIN/DNA)” |
| 472 | 2gli | A | 359 | 517 | 6.80E−28 | −0.25 | 0.05 | | “ZINC FINGER PROTEIN | “COMPLEX (DNA-BINDING |
| | | | | | | | | | GLI1; CHAIN: A; DNA; | PROTEIN/DNA) FIVE-FINGER GLI; GLI, |
| | | | | | | | | | CHAIN: C, D;” | ZINC FINGER, COMPLEX (DNA-BINDING |
| | | | | | | | | | | PROTEIN/DNA)” |
| 472 | 2gli | A | 323 | 462 | 6.30E−64 | | | 82.53 | “ZINC FINGER PROTEIN | “COMPLEX (DNA-BINDING |
| | | | | | | | | | GLI1; CHAIN: A; DNA; | PROTEIN/DNA) FIVE-FINGER GLI; GLI, |
| | | | | | | | | | CHAIN: C, D;” | ZINC FINGER, COMPLEX (DNA-BINDING |
| | | | | | | | | | | PROTEIN/DNA)” |
| 474 | 1alh | A | 182 | 262 | 1.20E−28 | −0.3 | 0.19 | | “QGSR ZINC FINGER | “COMPLEX (ZINC FINGER/DNA) |
| | | | | | | | | | PEPTIDE; CHAIN: A; | COMPLEX (ZINC FINGER/DNA), ZINC |
| | | | | | | | | | DUPLEX | FINGER, DNA-BINDING PROTEIN” |
| | | | | | | | | | OLIGONUCLEOTIDE | |
| | | | | | | | | | BINDING SITE; CHAIN: B, | |
| | | | | | | | | | C;” | |
| 474 | 1alh | A | 126 | 206 | 1.70E−27 | −0.37 | 0.13 | | “QGSR ZINC FINGER | “COMPLEX (ZINC FINGER/DNA) |
| | | | | | | | | | PEPTIDE; CHAIN: A; | COMPLEX (ZINC FINGER/DNA), ZINC |
| | | | | | | | | | DUPLEX | FINGER, DNA-BINDING PROTEIN” |
| | | | | | | | | | OLIGONUCLEOTIDE | |
| | | | | | | | | | BINDING SITE; CHAIN: B, | |
| | | | | | | | | | C;” | |
| 474 | 1alh | A | 154 | 234 | 1.70E−27 | 0.17 | 0.65 | | “QGSR ZINC FINGER | “COMPLEX (ZINC FINGER/DNA) |
| | | | | | | | | | PEPTIDE; CHAIN: A; | COMPLEX (ZINC FINGER/DNA), ZINC |
| | | | | | | | | | DUPLEX | FINGER, DNA-BINDING PROTEIN” |
| | | | | | | | | | OLIGONUCLEOTIDE | |
| | | | | | | | | | BINDING SITE; CHAIN: B, | |
| | | | | | | | | | C;” | |
| 474 | 1mey | C | 265 | 346 | 3.40E−51 | 0 | 1 | | “DNA; CHAIN: A, B, D, E; | “COMPLEX (ZINC FINGER/DNA) ZINC |
| | | | | | | | | | CONSENSUS ZINC FINGER | FINGER, PROTEIN-DNA INTERACTION, |
| | | | | | | | | | PROTEIN; CHAIN: C, F, G;” | PROTEIN DESIGN, 2 CRYSTAL |
| | | | | | | | | | | STRUCTURE, COMPLEX (ZINC |
| | | | | | | | | | | FINGER/DNA)” |
| 474 | 1mey | C | 349 | 430 | 1.20E−50 | 0.25 | 1 | | “DNA; CHAIN: A, B, D, E; | “COMPLEX (ZINC FINGER/DNA) ZINC |
| | | | | | | | | | CONSENSUS ZINC FINGER | FINGER, PROTEIN-DNA INTERACTION, |
| | | | | | | | | | PROTEIN; CHAIN: C, F, G;” | PROTEIN DESIGN, 2 CRYSTAL |
| | | | | | | | | | | STRUCTURE, COMPLEX (ZINC |
| | | | | | | | | | | FINGER/DNA)” |
| 474 | 1mey | C | 293 | 374 | 1.20E−50 | 0.01 | 1 | | “DNA; CHAIN: A, B, D, E; | “COMPLEX (ZINC FINGER/DNA) ZINC |
| | | | | | | | | | CONSENSUS ZINC FINGER | FINGER, PROTEIN-DNA INTERACTION, |
| | | | | | | | | | PROTEIN; CHAIN: C, F, G;” | PROTEIN DESIGN, 2 CRYSTAL |
| | | | | | | | | | | STRUCTURE, COMPLEX (ZINC |
| | | | | | | | | | | FINGER/DNA)” |
| 474 | 1mey | C | 377 | 458 | 1.20E−50 | 0.01 | 1 | | “DNA; CHAIN: A, B, D, E; | “COMPLEX (ZINC FINGER/DNA) ZINC |
| | | | | | | | | | CONSENSUS ZINC FINGER | FINGER, PROTEIN-DNA INTERACTION, |
| | | | | | | | | | PROTEIN; CHAIN: C, F, G;” | PROTEIN DESIGN, 2 CRYSTAL |
| | | | | | | | | | | STRUCTURE, COMPLEX (ZINC |
| | | | | | | | | | | FINGER/DNA)” |
| 474 | 1mey | C | 321 | 402 | 1.70E−50 | 0.38 | 1 | | “DNA; CHAIN: A, B, D, E; | “COMPLEX (ZINC FINGER/DNA) ZINC |
| | | | | | | | | | CONSENSUS ZINC FINGER | FINGER, PROTEIN-DNA INTERACTION, |
| | | | | | | | | | PROTEIN; CHAIN: C, F, G;” | PROTEIN DESIGN, 2 CRYSTAL |
| | | | | | | | | | | STRUCTURE, COMPLEX (ZINC |
| | | | | | | | | | | FINGER/DNA)” |
| 474 | 1mey | C | 237 | 318 | 1.70E−50 | 0.17 | 1 | | “DNA; CHAIN: A, B, D, E; | “COMPLEX (ZINC FINGER/DNA) ZINC |
| | | | | | | | | | CONSENSUS ZINC FINGER | FINGER, PROTEIN-DNA INTERACTION, |
| | | | | | | | | | PROTEIN; CHAIN: C, F, G;” | PROTEIN DESIGN, 2 CRYSTAL |
| | | | | | | | | | | STRUCTURE, COMPLEX (ZINC |
| | | | | | | | | | | FINGER/DNA)” |
| 474 | 1mey | C | 209 | 290 | 6.80E−50 | 0.08 | 0.98 | | “DNA; CHAIN: A, B, D, E; | “COMPLEX (ZINC FINGER/DNA) ZINC |
| | | | | | | | | | CONSENSUS ZINC FINGER | FINGER, PROTEIN-DNA INTERACTION, |
| | | | | | | | | | PROTEIN; CHAIN: C, F, G;” | PROTEIN DESIGN, 2 CRYSTAL |
| | | | | | | | | | | STRUCTURE, COMPLEX (ZINC |
| | | | | | | | | | | FINGER/DNA)” |
| 474 | 1mey | C | 181 | 262 | 1.20E−47 | 0.07 | 0.45 | | “DNA; CHAIN: A, B, D, E; | “COMPLEX (ZINC FINGER/DNA) ZINC |
| | | | | | | | | | CONSENSUS ZINC FINGER | FINGER, PROTEIN-DNA INTERACTION, |
| | | | | | | | | | PROTEIN; CHAIN: C, F, G;” | PROTEIN DESIGN, 2 CRYSTAL |
| | | | | | | | | | | STRUCTURE, COMPLEX (ZINC |
| | | | | | | | | | | FINGER/DNA)” |
| 474 | 1mey | C | 153 | 234 | 6.80E−47 | 0.2 | 0.94 | | “DNA; CHAIN: A, B, D, E; | “COMPLEX (ZINC FINGER/DNA) ZINC |
| | | | | | | | | | CONSENSUS ZINC FINGER | FINGER, PROTEIN-DNA INTERACTION, |
| | | | | | | | | | PROTEIN; CHAIN: C, F, G;” | PROTEIN DESIGN, 2 CRYSTAL |
| | | | | | | | | | | STRUCTURE, COMPLEX (ZINC |
| | | | | | | | | | | FINGER/DNA)” |
| 474 | 1mey | C | 125 | 206 | 3.40E−45 | −0.52 | 0.19 | | “DNA; CHAIN: A, B, D, E; | “COMPLEX (ZINC FINGER/DNA) ZINC |
| | | | | | | | | | CONSENSUS ZINC FINGER | FINGER, PROTEIN-DNA INTERACTION, |
| | | | | | | | | | PROTEIN; CHAIN: C, F, G;” | PROTEIN DESIGN, 2 CRYSTAL |
| | | | | | | | | | | STRUCTURE, COMPLEX (ZINC |
| | | | | | | | | | | FINGER/DNA)” |
| 474 | 1mey | C | 405 | 461 | 1.70E−33 | 0.03 | 0.99 | | “DNA; CHAIN: A, B, D, E; | “COMPLEX (ZINC FINGER/DNA) ZINC |
| | | | | | | | | | CONSENSUS ZINC FINGER | FINGER, PROTEIN-DNA INTERACTION, |
| | | | | | | | | | PROTEIN; CHAIN: C, F, G;” | PROTEIN DESIGN, 2 CRYSTAL |
| | | | | | | | | | | STRUCTURE, COMPLEX (ZINC |
| | | | | | | | | | | FINGER/DNA)” |
| 474 | 1mey | G | 291 | 318 | 5.10E−13 | 0.42 | 0.95 | | “DNA; CHAIN: A, B, D, E; | “COMPLEX (ZINC FINGER/DNA) ZINC |
| | | | | | | | | | CONSENSUS ZINC FINGER | FINGER, PROTEIN-DNA INTERACTION, |
| | | | | | | | | | PROTEIN; CHAIN: C, F, G;” | PROTEIN DESIGN, 2 CRYSTAL |
| | | | | | | | | | | STRUCTURE, COMPLEX (ZINC |
| | | | | | | | | | | FINGER/DNA)” |
| 474 | 1mey | C | 349 | 431 | 1.20E−50 | | | 103.69 | “DNA; CHAIN: A, B, D, E; | “COMPLEX (ZINC FINGER/DNA) ZINC |
| | | | | | | | | | CONSENSUS ZINC FINGER | FINGER, PROTEIN-DNA INTERACTION, |
| | | | | | | | | | PROTEIN; CHAIN: C, F, G;” | PROTEIN DESIGN, 2 CRYSTAL |
| | | | | | | | | | | STRUCTURE, COMPLEX (ZINC |
| | | | | | | | | | | FINGER/DNA)” |
| 474 | 1tf6 | A | 210 | 355 | 5.10E−38 | −0.15 | 0.51 | | “TFIIIA; CHAIN: A, D; 5S | “COMPLEX (TRANSCRIPTION |
| | | | | | | | | | RIBOSOMAL RNA GENE; | REGULATION/DNA) COMPLEX |
| | | | | | | | | | CHAIN: B, C, E, F;” | (TRANSCRIPTION REGULATION/DNA), |
| | | | | | | | | | | RNA POLYMERASE III, 2 TRANSCRIPTION |
| | | | | | | | | | | INITIATION, ZINC FINGER PROTEIN” |
| 474 | 1tf6 | A | 322 | 460 | 1.70E−36 | −0.05 | 0.8 | | “TFIIIA; CHAIN: A, D; 5S | “COMPLEX (TRANSCRIPTION |
| | | | | | | | | | RIBOSOMAL RNA GENE; | REGULATION/DNA) COMPLEX |
| | | | | | | | | | CHAIN: B, C, E, F;” | (TRANSCRIPTION REGULATION/DNA), |
| | | | | | | | | | | RNA POLYMERASE III, 2 TRANSCRIPTION |
| | | | | | | | | | | INITIATION, ZINC FINGER PROTEIN” |
| 474 | 1tf6 | A | 265 | 430 | 5.10E−38 | | | 117 | “TFIIIA; CHAIN: A, D; 5S | “COMPLEX (TRANSCRIPTION |
| | | | | | | | | | RIBOSOMAL RNA GENE; | REGULATION/DNA) COMPLEX |
| | | | | | | | | | CHAIN: B, C, E, F;” | (TRANSCRIPTION REGULATION/DNA), |
| | | | | | | | | | | RNA POLYMERASE III, 2 TRANSCRIPTION |
| | | | | | | | | | | INITIATION, ZINC FINGER PROTEIN” |
| 474 | 1ubd | C | 347 | 458 | 1.90E−59 | 0.29 | 1 | | “YY1; CHAIN: C; ADENO- | “COMPLEX (TRANSCRIPTION |
| | | | | | | | | | ASSOCIATED VIRUS P5 | REGULATION/DNA) YING-YANG 1; |
| | | | | | | | | | INITIATOR ELEMENT DNA; | TRANSCRIPTION INITIATION, INITIATOR |
| | | | | | | | | | CHAIN: A, B;” | ELEMENT, YY1, ZINC 2 FINGER PROTEIN, |
| | | | | | | | | | | DNA-PROTEIN RECOGNITION, 3 |
| | | | | | | | | | | COMPLEX (TRANSCRIPTION |
| | | | | | | | | | | REGULATION/DNA)” |
| 474 | 1ubd | C | 321 | 430 | 2.10E−56 | −0.01 | 1 | | “YY1; CHAIN: C; ADENO- | “COMPLEX (TRANSCRIPTION |
| | | | | | | | | | ASSOCIATED VIRUS P5 | REGULATION/DNA) YING-YANG 1; |
| | | | | | | | | | INITIATOR ELEMENT DNA; | TRANSCRIPTION INITIATION, INITIATOR |
| | | | | | | | | | CHAIN: A, B;” | ELEMENT, YY1, ZINC 2 FINGER PROTEIN, |
| | | | | | | | | | | DNA-PROTEIN RECOGNITION, 3 |
| | | | | | | | | | | COMPLEX (TRANSCRIPTION |
| | | | | | | | | | | REGULATION/DNA)” |
| 474 | 1ubd | C | 270 | 402 | 1.70E−52 | −0.16 | 0.65 | | “YY1; CHAIN: C; ADENO- | “COMPLEX (TRANSCRIPTION |
| | | | | | | | | | ASSOCIATED VIRUS P5 | REGULATION/DNA) YING-YANG 1; |
| | | | | | | | | | INITIATOR ELEMENT DNA; | TRANSCRIPTION INITIATION, INITIATOR |
| | | | | | | | | | CHAIN: A, B;” | ELEMENT, YY1, ZINC 2 FINGER PROTEIN, |
| | | | | | | | | | | DNA-PROTEIN RECOGNITION, 3 |
| | | | | | | | | | | COMPLEX (TRANSCRIPTION |
| | | | | | | | | | | REGULATION/DNA)” |
| 474 | 1ubd | C | 240 | 374 | 2.10E−44 | −0.3 | 0.63 | | “YY1; CHAIN: C; ADENO- | “COMPLEX (TRANSCRIPTION |
| | | | | | | | | | ASSOCIATED VIRUS P5 | REGULATION/DNA) YING-YANG 1; |
| | | | | | | | | | INITIATOR ELEMENT DNA; | TRANSCRIPTION INITIATION, INITIATOR |
| | | | | | | | | | CHAIN: A, B;” | ELEMENT, YY1, ZINC 2 FINGER PROTEIN, |
| | | | | | | | | | | DNA-PROTEIN RECOGNITION, 3 |
| | | | | | | | | | | COMPLEX (TRANSCRIPTION |
| | | | | | | | | | | REGULATION/DNA)” |
| 474 | 1ubd | C | 179 | 319 | 2.10E−40 | −0.51 | 0.07 | | “YY1; CHAIN: C; ADENO- | “COMPLEX (TRANSCRIPTION |
| | | | | | | | | | ASSOCIATED VIRUS P5 | REGULATION/DNA) YING-YANG 1; |
| | | | | | | | | | INITIATOR ELEMENT DNA; | TRANSCRIPTION INITIATION, INITIATOR |
| | | | | | | | | | CHAIN: A, B;” | ELEMENT, YY1, ZINC 2 FINGER PROTEIN, |
| | | | | | | | | | | DNA-PROTEIN RECOGNITION, 3 |
| | | | | | | | | | | COMPLEX (TRANSCRIPTION |
| | | | | | | | | | | REGULATION/DNA)” |
| 474 | 1ubd | C | 301 | 402 | 1.70E−35 | −0.22 | 0.95 | | “YY1; CHAIN: C; ADENO- | “COMPLEX (TRANSCRIPTION |
| | | | | | | | | | ASSOCIATED VIRUS P5 | REGULATION/DNA) YING-YANG 1; |
| | | | | | | | | | INITIATOR ELEMENT DNA; | TRANSCRIPTION INITIATION, INITIATOR |
| | | | | | | | | | CHAIN: A, B;” | ELEMENT, YY1, ZINC 2 FINGER PROTEIN, |
| | | | | | | | | | | DNA-PROTEIN RECOGNITION, 3 |
| | | | | | | | | | | COMPLEX (TRANSCRIPTION |
| | | | | | | | | | | REGULATION/DNA)” |
| 474 | 1ubd | C | 245 | 346 | 5.10E−35 | −0.24 | 0.89 | | “YY1; CHAIN: C; ADENO- | “COMPLEX (TRANSCRIPTION |
| | | | | | | | | | ASSOCIATED VIRUS P5 | REGULATION/DNA) YING-YANG 1; |
| | | | | | | | | | INITIATOR ELEMENT DNA; | TRANSCRIPTION INITIATION, INITIATOR |
| | | | | | | | | | CHAIN: A, B;” | ELEMENT, YY1, ZINC 2 FINGER PROTEIN, |
| | | | | | | | | | | DNA-PROTEIN RECOGNITION, 3 |
| | | | | | | | | | | COMPLEX (TRANSCRIPTION |
| | | | | | | | | | | REGULATION/DNA)” |
| 474 | 1ubd | C | 357 | 458 | 1.70E−34 | 0.09 | 0.99 | | “YY1; CHAIN: C; ADENO- | “COMPLEX (TRANSCRIPTION |
| | | | | | | | | | ASSOCIATED VIRUS P5 | REGULATION/DNA) YING-YANG 1; |
| | | | | | | | | | INITIATOR ELEMENT DNA; | TRANSCRIPTION INITIATION, INITIATOR |
| | | | | | | | | | CHAIN: A, B;” | ELEMENT, YY1, ZINC 2 FINGER PROTEIN, |
| | | | | | | | | | | DNA-PROTEIN RECOGNITION, 3 |
| | | | | | | | | | | COMPLEX (TRANSCRIPTION |
| | | | | | | | | | | REGULATION/DNA)” |
| 474 | 1ubd | C | 189 | 290 | 3.40E−34 | −0.33 | 0.24 | | “YY1; CHAIN: C; ADENO- | “COMPLEX (TRANSCRIPTION |
| | | | | | | | | | ASSOCIATED VIRUS P5 | REGULATION/DNA) YING-YANG 1; |
| | | | | | | | | | INITIATOR ELEMENT DNA; | TRANSCRIPTION INITIATION, INITIATOR |
| | | | | | | | | | CHAIN: A, B;” | ELEMENT, YY1, ZINC 2 FINGER PROTEIN, |
| | | | | | | | | | | DNA-PROTEIN RECOGNITION, 3 |
| | | | | | | | | | | COMPLEX (TRANSCRIPTION |
| | | | | | | | | | | REGULATION/DNA)” |
| 474 | 1ubd | C | 161 | 262 | 5.10E−32 | −0.36 | 0.51 | | “YY1; CHAIN: C; ADENO- | “COMPLEX (TRANSCRIPTION |
| | | | | | | | | | ASSOCIATED VIRUS P5 | REGULATION/DNA) YING-YANG 1; |
| | | | | | | | | | INITIATOR ELEMENT DNA; | TRANSCRIPTION INITIATION, INITIATOR |
| | | | | | | | | | CHAIN: A, B;” | ELEMENT, YY1, ZINC 2 FINGER PROTEIN, |
| | | | | | | | | | | DNA-PROTEIN RECOGNITION, 3 |
| | | | | | | | | | | COMPLEX (TRANSCRIPTION |
| | | | | | | | | | | REGULATION/DNA)” |
| 474 | 1ubd | C | 351 | 459 | 1.90E−59 | | | 87.13 | “YY1; CHAIN: C; ADENO- | “COMPLEX (TRANSCRIPTION |
| | | | | | | | | | ASSOCIATED VIRUS P5 | REGULATION/DNA) YING-YANG 1; |
| | | | | | | | | | INITIATOR ELEMENT DNA; | TRANSCRIPTION INITIATION, INITIATOR |
| | | | | | | | | | CHAIN: A, B;” | ELEMENT, YY1, ZINC 2 FINGER PROTEIN, |
| | | | | | | | | | | DNA-PROTEIN RECOGNITION, 3 |
| | | | | | | | | | | COMPLEX (TRANSCRIPTION |
| | | | | | | | | | | REGULATION/DNA)” |
| 474 | 2gli | A | 293 | 459 | 2.10E−74 | 0.08 | 0.96 | | “ZINC FINGER PROTEIN | “COMPLEX (DNA-BINDING |
| | | | | | | | | | GLI1; CHAIN: A; DNA; | PROTEIN/DNA) FIVE-FINGER GLI; GLI, |
| | | | | | | | | | CHAIN: C, D;” | ZINC FINGER, COMPLEX (DNA-BINDING |
| | | | | | | | | | | PROTEIN/DNA)” |
| 474 | 2gli | A | 154 | 348 | 4.20E−53 | −0.57 | 0.18 | | “ZINC FINGER PROTEIN | “COMPLEX (DNA-BINDING |
| | | | | | | | | | GLI1; CHAIN: A; DNA; | PROTEIN/DNA) FIVE-FINGER GLI; GLI, |
| | | | | | | | | | CHAIN: C, D;” | ZINC FINGER, COMPLEX (DNA-BINDING |
| | | | | | | | | | | PROTEIN/DNA)” |
| 474 | 2gli | A | 153 | 289 | 8.50E−34 | −0.18 | 0.66 | | “ZINC FINGER PROTEIN | “COMPLEX (DNA-BINDING |
| | | | | | | | | | GLI1; CHAIN: A; DNA; | PROTEIN/DNA) FIVE-FINGER GLI; GLI, |
| | | | | | | | | | CHAIN: C, D;” | ZINC FINGER, COMPLEX (DNA-BINDING |
| | | | | | | | | | | PROTEIN/DNA)” |
| 474 | 2gli | A | 245 | 373 | 1.20E−33 | −0.14 | 0.81 | | “ZINC FINGER PROTEIN | “COMPLEX (DNA-BINDING |
| | | | | | | | | | GLI1; CHAIN: A; DNA; | PROTEIN/DNA) FIVE-FINGER GLI; GLI, |
| | | | | | | | | | CHAIN: C, D;” | ZINC FINGER, COMPLEX (DNA-BINDING |
| | | | | | | | | | | PROTEIN/DNA)” |
| 474 | 2gli | A | 329 | 457 | 1.70E−33 | 0.34 | 0.99 | | “ZINC FINGER PROTEIN | “COMPLEX (DNA-BINDING |
| | | | | | | | | | GLI1; CHAIN: A; DNA; | PROTEIN/DNA) FIVE-FINGER GLI; GLI, |
| | | | | | | | | | CHAIN: C, D;” | ZINC FINGER, COMPLEX (DNA-BINDING |
| | | | | | | | | | | PROTEIN/DNA)” |
| 474 | 2gli | A | 265 | 404 | 2.10E−74 | | | 96.72 | “ZINC FINGER PROTEIN | “COMPLEX (DNA-BINDING |
| | | | | | | | | | GLI1; CHAIN: A; DNA; | PROTEIN/DNA) FIVE-FINGER GLI; GLI, |
| | | | | | | | | | CHAIN: C, D;” | ZINC FINGER, COMPLEX (DNA-BINDING |
| | | | | | | | | | | PROTEIN/DNA)” |
| 475 | 1alh | A | 132 | 240 | 2.10E−30 | −0.25 | 0.36 | | “QGSR ZINC FINGER | “COMPLEX (ZINC FINGER/DNA) |
| | | | | | | | | | PEPTIDE; CHAIN: A; | COMPLEX (ZINC FINGER/DNA), ZINC |
| | | | | | | | | | DUPLEX | FINGER, DNA-BINDING PROTEIN” |
| | | | | | | | | | OLIGONUCLEOTIDE | |
| | | | | | | | | | BINDING SITE; CHAIN: B, | |
| | | | | | | | | | C;” | |
| 475 | 1alh | A | 160 | 240 | 3.40E−28 | −0.17 | 0.83 | | “QGSR ZINC FINGER | “COMPLEX (ZINC FINGER/DNA) |
| | | | | | | | | | PEPTIDE; CHAIN: A; | COMPLEX (ZINC FINGER/DNA), ZINC |
| | | | | | | | | | DUPLEX | FINGER, DNA-BINDING PROTEIN” |
| | | | | | | | | | OLIGONUCLEOTIDE | |
| | | | | | | | | | BINDING SITE; CHAIN: B, | |
| | | | | | | | | | C;” | |
| 475 | 1alh | A | 132 | 212 | 1.70E−26 | −0.21 | 0.23 | | “QGSR ZINC FINGER | “COMPLEX (ZINC FINGER/DNA) |
| | | | | | | | | | PEPTIDE; CHAIN: A; | COMPLEX (ZINC FINGER/DNA), ZINC |
| | | | | | | | | | DUPLEX | FINGER, DNA-BINDING PROTEIN” |
| | | | | | | | | | OLIGONUCLEOTIDE | |
| | | | | | | | | | BINDING SITE; CHAIN: B, | |
| | | | | | | | | | C;” | |
| 475 | 1alh | A | 104 | 184 | 8.50E−26 | 0.04 | 0.17 | | “QGSR ZINC FINGER | “COMPLEX (ZINC FINGER/DNA) |
| | | | | | | | | | PEPTIDE; CHAIN: A; | COMPLEX (ZINC FINGER/DNA), ZINC |
| | | | | | | | | | DUPLEX | FINGER, DNA-BINDING PROTEIN” |
| | | | | | | | | | OLIGONUCLEOTIDE | |
| | | | | | | | | | BINDING SITE; CHAIN: B, | |
| | | | | | | | | | C;” | |
| 475 | 1alh | A | 80 | 156 | 8.50E−20 | −0.24 | 0.17 | | “QGSR ZINC FINGER | “COMPLEX (ZINC FINGER/DNA) |
| | | | | | | | | | PEPTIDE; CHAIN: A; | COMPLEX (ZINC FINGER/DNA), ZINC |
| | | | | | | | | | DUPLEX | FINGER, DNA-BINDING PROTEIN” |
| | | | | | | | | | OLIGONUCLEOTIDE | |
| | | | | | | | | | BINDING SITE; CHAIN: B, | |
| | | | | | | | | | C;” | |
| 475 | 1mey | C | 299 | 380 | 3.40E−51 | 0.66 | 1 | | “DNA; CHAIN: A, B, D, E; | “COMPLEX (ZINC FINGER/DNA) ZINC |
| | | | | | | | | | CONSENSUS ZINC FINGER | FINGER, PROTEIN-DNA INTERACTION, |
| | | | | | | | | | PROTEIN; CHAIN: C, F, G;” | PROTEIN DESIGN, 2 CRYSTAL |
| | | | | | | | | | | STRUCTURE, COMPLEX (ZINC |
| | | | | | | | | | | FINGER/DNA)” |
| 475 | 1mey | C | 327 | 408 | 6.80E−51 | 0.52 | 1 | | “DNA; CHAIN: A, B, D, E; | “COMPLEX (ZINC FINGER/DNA) ZINC |
| | | | | | | | | | CONSENSUS ZINC FINGER | FINGER, PROTEIN-DNA INTERACTION, |
| | | | | | | | | | PROTEIN; CHAIN: C, F, G;” | PROTEIN DESIGN, 2 CRYSTAL |
| | | | | | | | | | | STRUCTURE, COMPLEX (ZINC |
| | | | | | | | | | | FINGER/DNA)” |
| 475 | 1mey | C | 355 | 436 | 8.50E−51 | 0.45 | 1 | | “DNA; CHAIN: A, B, D, E; | “COMPLEX (ZINC FINGER/DNA) ZINC |
| | | | | | | | | | CONSENSUS ZINC FINGER | FINGER, PROTEIN-DNA INTERACTION, |
| | | | | | | | | | PROTEIN; CHAIN: C, F, G;” | PROTEIN DESIGN, 2 CRYSTAL |
| | | | | | | | | | | STRUCTURE, COMPLEX (ZINC |
| | | | | | | | | | | FINGER/DNA)” |
| 475 | 1mey | C | 411 | 492 | 1.20E−50 | 0.36 | 1 | | “DNA; CHAIN: A, B, D, E; | “COMPLEX (ZINC FINGER/DNA) ZINC |
| | | | | | | | | | CONSENSUS ZINC FINGER | FINGER, PROTEIN-DNA INTERACTION, |
| | | | | | | | | | PROTEIN; CHAIN: C, F, G;” | PROTEIN DESIGN, 2 CRYSTAL |
| | | | | | | | | | | STRUCTURE, COMPLEX (ZINC |
| | | | | | | | | | | FINGER/DNA)” |
| 475 | 1mey | C | 383 | 464 | 1.20E−50 | 0.38 | 1 | | “DNA; CHAIN: A, B, D, E; | “COMPLEX (ZINC FINGER/DNA) ZINC |
| | | | | | | | | | CONSENSUS ZINC FINGER | FINGER, PROTEIN-DNA INTERACTION, |
| | | | | | | | | | PROTEIN; CHAIN: C, F, G;” | PROTEIN DESIGN, 2 CRYSTAL |
| | | | | | | | | | | STRUCTURE, COMPLEX (ZINC |
| | | | | | | | | | | FINGER/DNA)” |
| 475 | 1mey | C | 271 | 352 | 1.70E−50 | 0.48 | 1 | | “DNA; CHAIN: A, B, D, E; | “COMPLEX (ZINC FINGER/DNA) ZINC |
| | | | | | | | | | CONSENSUS ZINC FINGER | FINGER, PROTEIN-DNA INTERACTION, |
| | | | | | | | | | PROTEIN; CHAIN: C, F, G;” | PROTEIN DESIGN, 2 CRYSTAL |
| | | | | | | | | | | STRUCTURE, COMPLEX (ZINC |
| | | | | | | | | | | FINGER/DNA)” |
| 475 | 1mey | C | 243 | 324 | 8.50E−50 | 0.36 | 1 | | “DNA; CHAIN: A, B, D, E; | “COMPLEX (ZINC FINGER/DNA) ZINC |
| | | | | | | | | | CONSENSUS ZINC FINGER | FINGER, PROTEIN-DNA INTERACTION, |
| | | | | | | | | | PROTEIN; CHAIN: C, F, G;” | PROTEIN DESIGN, 2 CRYSTAL |
| | | | | | | | | | | STRUCTURE, COMPLEX (ZINC |
| | | | | | | | | | | FINGER/DNA)” |
| 475 | 1mey | C | 215 | 296 | 3.40E−48 | 0.47 | 1 | | “DNA; CHAIN: A, B, D, E; | “COMPLEX (ZINC FINGER/DNA) ZINC |
| | | | | | | | | | CONSENSUS ZINC FINGER | FINGER, PROTEIN-DNA INTERACTION, |
| | | | | | | | | | PROTEIN; CHAIN: C, F, G;” | PROTEIN DESIGN, 2 CRYSTAL |
| | | | | | | | | | | STRUCTURE, COMPLEX (ZINC |
| | | | | | | | | | | FINGER/DNA)” |
| 475 | 1mey | C | 187 | 268 | 1.70E−47 | −0.12 | 1 | | “DNA; CHAIN: A, B, D, E; | “COMPLEX (ZINC FINGER/DNA) ZINC |
| | | | | | | | | | CONSENSUS ZINC FINGER | FINGER, PROTEIN-DNA INTERACTION, |
| | | | | | | | | | PROTEIN; CHAIN: C, F, G;” | PROTEIN DESIGN, 2 CRYSTAL |
| | | | | | | | | | | STRUCTURE, COMPLEX (ZINC |
| | | | | | | | | | | FINGER/DNA)” |
| 475 | 1mey | C | 159 | 240 | 5.10E−46 | −0.28 | 0.95 | | “DNA; CHAIN: A, B, D, E; | “COMPLEX (ZINC FINGER/DNA) ZINC |
| | | | | | | | | | CONSENSUS ZINC FINGER | FINGER, PROTEIN-DNA INTERACTION, |
| | | | | | | | | | PROTEIN; CHAIN: C, F, G;” | PROTEIN DESIGN, 2 CRYSTAL |
| | | | | | | | | | | STRUCTURE, COMPLEX (ZINC |
| | | | | | | | | | | FINGER/DNA)” |
| 475 | 1mey | C | 131 | 212 | 8.50E−45 | −0.05 | 0.62 | | “DNA; CHAIN: A, B, D, E; | “COMPLEX (ZINC FINGER/DNA) ZINC |
| | | | | | | | | | CONSENSUS ZINC FINGER | FINGER, PROTEIN-DNA INTERACTION, |
| | | | | | | | | | PROTEIN; CHAIN: C, F, G;” | PROTEIN DESIGN, 2 CRYSTAL |
| | | | | | | | | | | STRUCTURE, COMPLEX (ZINC |
| | | | | | | | | | | FINGER/DNA)” |
| 475 | 1mey | C | 103 | 184 | 1.70E−42 | 0.26 | 0.76 | | “DNA; CHAIN: A, B, D, E; | “COMPLEX (ZINC FINGER/DNA) ZINC |
| | | | | | | | | | CONSENSUS ZINC FINGER | FINGER, PROTEIN-DNA INTERACTION, |
| | | | | | | | | | PROTEIN; CHAIN: C, F, G;” | PROTEIN DESIGN, 2 CRYSTAL |
| | | | | | | | | | | STRUCTURE, COMPLEX (ZINC |
| | | | | | | | | | | FINGER/DNA)” |
| 475 | 1mey | C | 439 | 498 | 8.50E−36 | 0.18 | 0.92 | | “DNA; CHAIN: A, B, D, E; | “COMPLEX (ZINC FINGER/DNA) ZINC |
| | | | | | | | | | CONSENSUS ZINC FINGER | FINGER, PROTEIN-DNA INTERACTION, |
| | | | | | | | | | PROTEIN; CHAIN: C, F, G;” | PROTEIN DESIGN, 2 CRYSTAL |
| | | | | | | | | | | STRUCTURE, COMPLEX (ZINC |
| | | | | | | | | | | FINGER/DNA)” |
| 475 | 1mey | C | 79 | 156 | 1.50E−33 | 0.08 | −0.06 | | “DNA; CHAIN: A, B, D, E; | “COMPLEX (ZINC FINGER/DNA) ZINC |
| | | | | | | | | | CONSENSUS ZINC FINGER | FINGER, PROTEIN-DNA INTERACTION, |
| | | | | | | | | | PROTEIN; CHAIN: C, F, G;” | PROTEIN DESIGN, 2 CRYSTAL |
| | | | | | | | | | | STRUCTURE, COMPLEX (ZINC |
| | | | | | | | | | | FINGER/DNA)” |
| 475 | 1mey | C | 383 | 465 | 8.50E−51 | | | 107.97 | “DNA; CHAIN: A, B, D, E; | “COMPLEX (ZINC FINGER/DNA) ZINC |
| | | | | | | | | | CONSENSUS ZINC FINGER | FINGER, PROTEIN-DNA INTERACTION, |
| | | | | | | | | | PROTEIN; CHAIN: C, F, G;” | PROTEIN DESIGN, 2 CRYSTAL |
| | | | | | | | | | | STRUCTURE, COMPLEX (ZINC |
| | | | | | | | | | | FINGER/DNA)” |
| 475 | 1tf3 | A | 80 | 156 | 1.40E−13 | 0.02 | −0.14 | | “TRANSCRIPTION FACTOR | “COMPLEX (TRANSCRIPTION |
| | | | | | | | | | IIIA; CHAIN: A; 5S RNA | REGULATION/DNA) TFIIIA; 5S GENE; |
| | | | | | | | | | GENE; CHAIN: E, F;” | NMR, TFIIIA, PROTEIN, DNA, |
| | | | | | | | | | | TRANSCRIPTION FACTOR, 5S RNA 2 |
| | | | | | | | | | | GENE, DNA BINDING PROTEIN, ZINC |
| | | | | | | | | | | FINGER, COMPLEX 3 (TRANSCRIPTION |
| | | | | | | | | | | REGULATION/DNA)” |
| 475 | 1tf6 | A | 244 | 389 | 3.40E−38 | 0.05 | 0.99 | | “TFIIIA; CHAIN: A, D; 5S | “COMPLEX (TRANSCRIPTION |
| | | | | | | | | | RIBOSOMAL RNA GENE; | REGULATION/DNA) COMPLEX |
| | | | | | | | | | CHAIN: B, C, E, F;” | (TRANSCRIPTION REGULATION/DNA), |
| | | | | | | | | | | RNA POLYMERASE III, 2 TRANSCRIPTION |
| | | | | | | | | | | INITIATION, ZINC FINGER PROTEIN” |
| 475 | 1tf6 | A | 328 | 474 | 1.00E−37 | 0.43 | 1 | | “TFIIIA; CHAIN: A, D; 5S | “COMPLEX (TRANSCRIPTION |
| | | | | | | | | | RIBOSOMAL RNA GENE; | REGULATION/DNA) COMPLEX |
| | | | | | | | | | CHAIN: B, C, E, F;” | (TRANSCRIPTION REGULATION/DNA), |
| | | | | | | | | | | RNA POLYMERASE III, 2 TRANSCRIPTION |
| | | | | | | | | | | INITIATION, ZINC FINGER PROTEIN” |
| 475 | 1tf6 | A | 356 | 494 | 3.40E−37 | 0.15 | 1 | | “TFIIIA; CHAIN: A, D; 5S | “COMPLEX (TRANSCRIPTION |
| | | | | | | | | | RIBOSOMAL RNA GENE; | REGULATION/DNA) COMPLEX |
| | | | | | | | | | CHAIN: B, C, E, F;” | (TRANSCRIPTION REGULATION/DNA), |
| | | | | | | | | | | RNA POLYMERASE III, 2 TRANSCRIPTION |
| | | | | | | | | | | INITIATION, ZINC FINGER PROTEIN” |
| 475 | 1tf6 | A | 188 | 333 | 5.10E−37 | 0.17 | 0.98 | | “TFIIIA; CHAIN: A, D; 5S | “COMPLEX (TRANSCRIPTION |
| | | | | | | | | | RIBOSOMAL RNA GENE; | REGULATION/DNA) COMPLEX |
| | | | | | | | | | CHAIN: B, C, E, F;” | (TRANSCRIPTION REGULATION/DNA), |
| | | | | | | | | | | RNA POLYMERASE III, 2 TRANSCRIPTION |
| | | | | | | | | | | INITIATION, ZINC FINGER PROTEIN” |
| 475 | 1tf6 | A | 132 | 277 | 1.70E−35 | 0 | 0.88 | | “TFIIIA; CHAIN: A, D; 5S | “COMPLEX (TRANSCRIPTION |
| | | | | | | | | | RIBOSOMAL RNA GENE; | REGULATION/DNA) COMPLEX |
| | | | | | | | | | CHAIN: B, C, E, F;” | (TRANSCRIPTION REGULATION/DNA), |
| | | | | | | | | | | RNA POLYMERASE III, 2 TRANSCRIPTION |
| | | | | | | | | | | INITIATION, ZINC FINGER PROTEIN” |
| 475 | 1tf6 | A | 80 | 221 | 1.70E−30 | −0.12 | 0.01 | | “TFIIIA; CHAIN: A, D; 5S | “COMPLEX (TRANSCRIPTION |
| | | | | | | | | | RIBOSOMAL RNA GENE; | REGULATION/DNA) COMPLEX |
| | | | | | | | | | CHAIN: B, C, E, F;” | (TRANSCRIPTION REGULATION/DNA), |
| | | | | | | | | | | RNA POLYMERASE III, 2 TRANSCRIPTION |
| | | | | | | | | | | INITIATION, ZINC FINGER PROTEIN” |
| 475 | 1tf6 | A | 299 | 467 | 3.40E−38 | | | 120.08 | “TFIIIA; CHAIN: A, D; 5S | “COMPLEX (TRANSCRIPTION |
| | | | | | | | | | RIBOSOMAL RNA GENE; | REGULATION/DNA) COMPLEX |
| | | | | | | | | | CHAIN: B, C, E, F;” | (TRANSCRIPTION REGULATION/DNA), |
| | | | | | | | | | | RNA POLYMERASE III, 2 TRANSCRIPTION |
| | | | | | | | | | | INITIATION, ZINC FINGER PROTEIN” |
| 475 | 1ubd | C | 297 | 408 | 6.30E−59 | 0.55 | 1 | | “YY1; CHAIN: C; ADENO- | “COMPLEX (TRANSCRIPTION |
| | | | | | | | | | ASSOCIATED VIRUS P5 | REGULATION/DNA) YING-YANG 1; |
| | | | | | | | | | INITIATOR ELEMENT DNA; | TRANSCRIPTION INITIATION, INITIATOR |
| | | | | | | | | | CHAIN: A, B;” | ELEMENT, YY1, ZINC 2 FINGER PROTEIN, |
| | | | | | | | | | | DNA-PROTEIN RECOGNITION, 3 |
| | | | | | | | | | | COMPLEX (TRANSCRIPTION |
| | | | | | | | | | | REGULATION/DNA)” |
| 475 | 1ubd | C | 381 | 492 | 1.00E−57 | 0.22 | 1 | | “YY1; CHAIN: C; ADENO- | “COMPLEX (TRANSCRIPTION |
| | | | | | | | | | ASSOCIATED VIRUS P5 | REGULATION/DNA) YING-YANG 1; |
| | | | | | | | | | INITIATOR ELEMENT DNA; | TRANSCRIPTION INITIATION, INITIATOR |
| | | | | | | | | | CHAIN: A, B;” | ELEMENT, YY1, ZINC 2 FINGER PROTEIN, |
| | | | | | | | | | | DNA-PROTEIN RECOGNITION, 3 |
| | | | | | | | | | | COMPLEX (TRANSCRIPTION |
| | | | | | | | | | | REGULATION/DNA)” |
| 475 | 1ubd | C | 269 | 380 | 1.90E−57 | 0.25 | 1 | | “YY1; CHAIN: C; ADENO- | “COMPLEX (TRANSCRIPTION |
| | | | | | | | | | ASSOCIATED VIRUS P5 | REGULATION/DNA) YING-YANG 1; |
| | | | | | | | | | INITIATOR ELEMENT DNA; | TRANSCRIPTION INITIATION, INITIATOR |
| | | | | | | | | | CHAIN: A, B;” | ELEMENT, YY1, ZINC 2 FINGER PROTEIN, |
| | | | | | | | | | | DNA-PROTEIN RECOGNITION, 3 |
| | | | | | | | | | | COMPLEX (TRANSCRIPTION |
| | | | | | | | | | | REGULATION/DNA)” |
| 475 | 1ubd | C | 242 | 352 | 2.10E−56 | 0.28 | 1 | | “YY1; CHAIN: C; ADENO- | “COMPLEX (TRANSCRIPTION |
| | | | | | | | | | ASSOCIATED VIRUS P5 | REGULATION/DNA) YING-YANG 1; |
| | | | | | | | | | INITIATOR ELEMENT DNA; | TRANSCRIPTION INITIATION, INITIATOR |
| | | | | | | | | | CHAIN: A, B;” | ELEMENT, YY1, ZINC 2 FINGER PROTEIN, |
| | | | | | | | | | | DNA-PROTEIN RECOGNITION, 3 |
| | | | | | | | | | | COMPLEX (TRANSCRIPTION |
| | | | | | | | | | | REGULATION/DNA)” |
| 475 | 1ubd | C | 353 | 464 | 1.90E−55 | −0.06 | 1 | | “YY1; CHAIN: C; ADENO- | “COMPLEX (TRANSCRIPTION |
| | | | | | | | | | ASSOCIATED VIRUS P5 | REGULATION/DNA) YING-YANG 1; |
| | | | | | | | | | INITIATOR ELEMENT DNA; | TRANSCRIPTION INITIATION, INITIATOR |
| | | | | | | | | | CHAIN: A, B;” | ELEMENT, YY1, ZINC 2 FINGER PROTEIN, |
| | | | | | | | | | | DNA-PROTEIN RECOGNITION, 3 |
| | | | | | | | | | | COMPLEX (TRANSCRIPTION |
| | | | | | | | | | | REGULATION/DNA)” |
| 475 | 1ubd | C | 192 | 324 | 1.50E−49 | −0.3 | 0.18 | | “YY1; CHAIN: C; ADENO- | “COMPLEX (TRANSCRIPTION |
| | | | | | | | | | ASSOCIATED VIRUS P5 | REGULATION/DNA) YING-YANG 1; |
| | | | | | | | | | INITIATOR ELEMENT DNA; | TRANSCRIPTION INITIATION, INITIATOR |
| | | | | | | | | | CHAIN: A, B;” | ELEMENT, YY1, ZINC 2 FINGER PROTEIN, |
| | | | | | | | | | | DNA-PROTEIN RECOGNITION, 3 |
| | | | | | | | | | | COMPLEX (TRANSCRIPTION |
| | | | | | | | | | | REGULATION/DNA)” |
| 475 | 1ubd | C | 136 | 268 | 2.10E−40 | −0.3 | 0.78 | | “YY1; CHAIN: C; ADENO- | “COMPLEX (TRANSCRIPTION |
| | | | | | | | | | ASSOCIATED VIRUS P5 | REGULATION/DNA) YING-YANG 1; |
| | | | | | | | | | INITIATOR ELEMENT DNA; | TRANSCRIPTION INITIATION, INITIATOR |
| | | | | | | | | | CHAIN: A, B;” | ELEMENT, YY1, ZINC 2 FINGER PROTEIN, |
| | | | | | | | | | | DNA-PROTEIN RECOGNITION, 3 |
| | | | | | | | | | | COMPLEX (TRANSCRIPTION |
| | | | | | | | | | | REGULATION/DNA)” |
| 475 | 1ubd | C | 360 | 464 | 3.40E−35 | 0.2 | 1 | | “YY1; CHAIN: C; ADENO- | “COMPLEX (TRANSCRIPTION |
| | | | | | | | | | ASSOCIATED VIRUS P5 | REGULATION/DNA) YING-YANG 1; |
| | | | | | | | | | INITIATOR ELEMENT DNA; | TRANSCRIPTION INITIATION, INITIATOR |
| | | | | | | | | | CHAIN: A, B;” | ELEMENT, YY1, ZINC 2 FINGER PROTEIN, |
| | | | | | | | | | | DNA-PROTEIN RECOGNITION, 3 |
| | | | | | | | | | | COMPLEX (TRANSCRIPTION |
| | | | | | | | | | | REGULATION/DNA)” |
| 475 | 1ubd | C | 335 | 436 | 8.50E−35 | 0.13 | 1 | | “YY1; CHAIN: C; ADENO- | “COMPLEX (TRANSCRIPTION |
| | | | | | | | | | ASSOCIATED VIRUS P5 | REGULATION/DNA) YING-YANG 1; |
| | | | | | | | | | INITIATOR ELEMENT DNA; | TRANSCRIPTION INITIATION, INITIATOR |
| | | | | | | | | | CHAIN: A, B;” | ELEMENT, YY1, ZINC 2 FINGER PROTEIN, |
| | | | | | | | | | | DNA-PROTEIN RECOGNITION, 3 |
| | | | | | | | | | | COMPLEX (TRANSCRIPTION |
| | | | | | | | | | | REGULATION/DNA)” |
| 475 | 1ubd | C | 167 | 268 | 1.70E−32 | −0.09 | 0.95 | | “YY1; CHAIN: C; ADENO- | “COMPLEX (TRANSCRIPTION |
| | | | | | | | | | ASSOCIATED VIRUS P5 | REGULATION/DNA) YING-YANG 1; |
| | | | | | | | | | INITIATOR ELEMENT DNA; | TRANSCRIPTION INITIATION, INITIATOR |
| | | | | | | | | | CHAIN: A, B;” | ELEMENT, YY1, ZINC 2 FINGER PROTEIN, |
| | | | | | | | | | | DNA-PROTEIN RECOGNITION, 3 |
| | | | | | | | | | | COMPLEX (TRANSCRIPTION |
| | | | | | | | | | | REGULATION/DNA)” |
| 475 | 1ubd | C | 111 | 212 | 6.80E−30 | −0.08 | 0.27 | | “YY1; CHAIN: C; ADENO- | “COMPLEX (TRANSCRIPTION |
| | | | | | | | | | ASSOCIATED VIRUS P5 | REGULATION/DNA) YING-YANG 1; |
| | | | | | | | | | INITIATOR ELEMENT DNA; | TRANSCRIPTION INITIATION, INITIATOR |
| | | | | | | | | | CHAIN: A, B;” | ELEMENT, YY1, ZINC 2 FINGER PROTEIN, |
| | | | | | | | | | | DNA-PROTEIN RECOGNITION, 3 |
| | | | | | | | | | | COMPLEX (TRANSCRIPTION |
| | | | | | | | | | | REGULATION/DNA)” |
| 475 | 1ubd | C | 355 | 465 | 1.00E−57 | | | 90.92 | “YY1; CHAIN: C; ADENO- | “COMPLEX (TRANSCRIPTION |
| | | | | | | | | | ASSOCIATED VIRUS P5 | REGULATION/DNA) YING-YANG 1; |
| | | | | | | | | | INITIATOR ELEMENT DNA; | TRANSCRIPTION INITIATION, INITIATOR |
| | | | | | | | | | CHAIN: A, B;” | ELEMENT, YY1, ZINC 2 FINGER PROTEIN, |
| | | | | | | | | | | DNA-PROTEIN RECOGNITION, 3 |
| | | | | | | | | | | COMPLEX (TRANSCRIPTION |
| | | | | | | | | | | REGULATION/DNA)” |
| 475 | 2adr | | 104 | 158 | 3.40E−13 | 0.08 | 0.09 | | ADR1; CHAIN: NULL; | “TRANSCRIPTION REGULATION |
| | | | | | | | | | | TRANSCRIPTION REGULATION, ADR1, |
| | | | | | | | | | | ZINC FINGER, NMR” |
| 475 | 2gli | A | 271 | 410 | 8.40E−75 | 0.42 | 1 | | “ZINC FINGER PROTEIN | “COMPLEX (DNA-BINDING |
| | | | | | | | | | GLI1; CHAIN: A; DNA; | PROTEIN/DNA) FIVE-FINGER GLI; GLI, |
| | | | | | | | | | CHAIN: C, D;” | ZINC FINGER, COMPLEX (DNA-BINDING |
| | | | | | | | | | | PROTEIN/DNA)” |
| 475 | 2gli | A | 327 | 466 | 8.40E−74 | 0.16 | 1 | | “ZINC FINGER PROTEIN | “COMPLEX (DNA-BINDING |
| | | | | | | | | | GLI1; CHAIN: A; DNA; | PROTEIN/DNA) FIVE-FINGER GLI; GLI, |
| | | | | | | | | | CHAIN: C, D;” | ZINC FINGER, COMPLEX (DNA-BINDING |
| | | | | | | | | | | PROTEIN/DNA)” |
| 475 | 2gli | A | 188 | 326 | 2.10E−65 | 0.34 | 0.87 | | “ZINC FINGER PROTEIN | “COMPLEX (DNA-BINDING |
| | | | | | | | | | GLI1; CHAIN: A; DNA; | PROTEIN/DNA) FIVE-FINGER GLI; GLI, |
| | | | | | | | | | CHAIN: C, D;” | ZINC FINGER, COMPLEX (DNA-BINDING |
| | | | | | | | | | | PROTEIN/DNA)” |
| 475 | 2gli | A | 383 | 495 | 1.50E−56 | 0.3 | 0.93 | | “ZINC FINGER PROTEIN | “COMPLEX (DNA-BINDING |
| | | | | | | | | | GLI1; CHAIN: A; DNA; | PROTEIN/DNA) FIVE-FINGER GLI; GLI, |
| | | | | | | | | | CHAIN: C, D;” | ZINC FINGER, COMPLEX (DNA-BINDING |
| | | | | | | | | | | PROTEIN/DNA)” |
| 475 | 2gli | A | 363 | 494 | 6.80E−35 | 0.24 | 1 | | “ZINC FINGER PROTEIN | “COMPLEX (DNA-BINDING |
| | | | | | | | | | GLI1; CHAIN: A; DNA; | PROTEIN/DNA) FIVE-FINGER GLI; GLI, |
| | | | | | | | | | CHAIN: C, D;” | ZINC FINGER, COMPLEX (DNA-BINDING |
| | | | | | | | | | | PROTEIN/DNA)” |
| 475 | 2gli | A | 103 | 239 | 8.50E−33 | −0.19 | 0.13 | | “ZINC FINGER PROTEIN | “COMPLEX (DNA-BINDING |
| | | | | | | | | | GLI1; CHAIN: A; DNA; | PROTEIN/DNA) FIVE-FINGER GLI; GLI, |
| | | | | | | | | | CHAIN: C, D;” | ZINC FINGER, COMPLEX (DNA-BINDING |
| | | | | | | | | | | PROTEIN/DNA)” |
| 475 | 2gli | A | 243 | 382 | 8.40E−75 | | | 105.12 | “ZINC FINGER PROTEIN | “COMPLEX (DNA-BINDING |
| | | | | | | | | | GLI1; CHAIN: A; DNA; | PROTEIN/DNA) FIVE-FINGER GLI; GLI, |
| | | | | | | | | | CHAIN: C, D;” | ZINC FINGER, COMPLEX (DNA-BINDING |
| | | | | | | | | | | PROTEIN/DNA)” |
| 476 | 1klo | | 139 | 295 | 1.70E−16 | | | 70.8 | LAMININ; CHAIN: NULL; | GLYCOPROTEIN GLYCOPROTEIN |
| 476 | 1skz | | 63 | 181 | 2.10E−13 | −0.33 | 0.34 | | ANTISTASIN; CHAIN: NULL; | “SERINE PROTEASE INHIBITOR FACTOR |
| | | | | | | | | | | XA INHIBITOR; ANTISTASIN, CRYSTAL |
| | | | | | | | | | | STRUCTURE, FACTOR XA INHIBITOR, 2 |
| | | | | | | | | | | SERINE PROTEASE INHIBITOR, |
| | | | | | | | | | | THROMBOSIS” |
| 476 | 1skz | | 88 | 191 | 6.30E−12 | −0.41 | 0.04 | | ANTISTASIN; CHAIN: NULL; | “SERINE PROTEASE INHIBITOR FACTOR |
| | | | | | | | | | | XA INHIBITOR; ANTISTASIN, CRYSTAL |
| | | | | | | | | | | STRUCTURE, FACTOR XA INHIBITOR, 2 |
| | | | | | | | | | | SERINE PROTEASE INHIBITOR, |
| | | | | | | | | | | THROMBOSIS” |
| 476 | 1skz | | 179 | 279 | 8.40E−12 | −0.64 | 0.09 | | ANTISTASIN; CHAIN: NULL; | “SERINE PROTEASE INHIBITOR FACTOR |
| | | | | | | | | | | XA INHIBITOR; ANTISTASIN, CRYSTAL |
| | | | | | | | | | | STRUCTURE, FACTOR XA INHIBITOR, 2 |
| | | | | | | | | | | SERINE PROTEASE INHIBITOR, |
| | | | | | | | | | | THROMBOSIS” |
| 476 | 1vmo | A | 25 | 200 | 4.20E−21 | 0.04 | −0.18 | | | MEMBRANE PROTEIN VITELLINE |
| | | | | | | | | | | MEMBRANE OUTER LAYER PROTEIN I |
| | | | | | | | | | | 1VMO 3 |
| 476 | 9wga | A | 56 | 240 | 3.40E−16 | | | 84.52 | | LECTIN (AGGLUTININ) WHEAT GERM |
| | | | | | | | | | | AGGLUTININ (ISOLECTIN 2) 9WGA 3 |
| 479 | 1chc | | 26 | 84 | 6.30E−10 | 0.23 | 0.21 | | | “VIRUS EQUINE HERPES VIRUS-1 (C3HC4, |
| | | | | | | | | | | OR RING DOMAIN) 1CHC 3 (NMR, 1 |
| | | | | | | | | | | STRUCTURE) 1CHC 4” |
| 479 | 1fbv | A | 28 | 92 | 4.20E−11 | −0.06 | 0.15 | | SIGNAL TRANSDUCTION | “LIGASE CBL, UBCH7, ZAP-70, E2, |
| | | | | | | | | | PROTEIN CBL; CHAIN: A; | UBIQUITIN, E3, PHOSPHORYLATION, 2 |
| | | | | | | | | | ZAP-70 PEPTIDE; CHAIN: B; | TYROSINE KINASE, UBIQUITINATION, |
| | | | | | | | | | UBIQUITIN-CONIUGATING | PROTEIN DEGRADATION,” |
| | | | | | | | | | ENZYME E12-18 KDA | |
| | | | | | | | | | UBCH7; CHAIN: C; | |
| 479 | 1fbv | A | 29 | 69 | 1.70E−08 | 0.26 | 0.53 | | SIGNAL TRANSDUCTION | “LIGASE CBL, UBCH7, ZAP-70, E2, |
| | | | | | | | | | PROTEIN CBL; CHAIN: A; | UBIQITIN, E3, PHOSPHORYLATION, 2 |
| | | | | | | | | | ZAP-70 PEPTIDE; CHAIN: B; | TYROSINE KINASE, UBIQUITINATION, |
| | | | | | | | | | UBIQUITIN-CONJUGATING | PROTEIN DEGRADATION,” |
| | | | | | | | | | ENZYME E12-18 KDA | |
| | | | | | | | | | UBCH7; CHAIN: C; | |
| 479 | 1fre | | 130 | 166 | 1.10E−13 | 0.07 | 0.89 | | NUCLEAR FACTOR XNF7; | “ZINC-BINDING PROTEIN ZINC-BINDING |
| | | | | | | | | | CHAIN: NULL; | PROTEIN, XNF7, BBOX, DEVELOPMENT, 3 |
| | | | | | | | | | | MID-BLASTULA-TRANSITION” |
| 479 | 1fre | | 130 | 166 | 0.00051 | 0.07 | 0.89 | | NUCLEAR FACTOR XNF7; | “ZINC-BINDING PROTEIN ZINC-BINDING |
| | | | | | | | | | CHAIN: NULL; | PROTEIN, XNF7, BBOX, DEVELOPMENT, 3 |
| | | | | | | | | | | MID-BLASTULA-TRANSITION” |
| 479 | 1rmd | | 16 | 103 | 1.30E−18 | 0.4 | 0.13 | | RAG1; CHAIN: NULL; | “DNA-BINDING PROTEIN V(D)J |
| | | | | | | | | | | RECOMBINATION ACTIVATING PROTEIN |
| | | | | | | | | | | 1; RAG1, V(D)J RECOMBINATION, |
| | | | | | | | | | | ANTIBODY, MAD, RING FINGER, 2 ZINC |
| | | | | | | | | | | BINUCLEAR CLUSTER, ZINC FINGER, |
| | | | | | | | | | | DNA-BINDING PROTEIN” |
| 479 | 1rmd | | 29 | 107 | 1.70E−12 | 0.3 | −0.07 | | RAG1; CHAIN: NULL; | “DNA-BINDING PROTEIN V(D)J |
| | | | | | | | | | | RECOMBINATION ACTIVATING PROTEIN |
| | | | | | | | | | | 1; RAG1, V(D)J RECOMBINATION, |
| | | | | | | | | | | ANTIBODY, MAD, RING FINGER, 2 ZINC |
| | | | | | | | | | | BINUCLEAR CLUSTER, ZINC FINGER, |
| | | | | | | | | | | DNA-BINDING PROTEIN” |
| 479 | 1rmd | | 5 | 136 | 1.30E−18 | | | 54.99 | RAG1; CHAIN: NULL; | “DNA-BINDING PROTEIN V(D)J |
| | | | | | | | | | | RECOMBINATION ACTIVATING PROTEIN |
| | | | | | | | | | | 1; RAG1, V(D)J RECOMBINATION, |
| | | | | | | | | | | ANTIBODY, MAD, RING FINGER, 2 ZINC |
| | | | | | | | | | | BINUCLEAR CLUSTER, ZINC FINGER, |
| | | | | | | | | | | DNA-BINDING PROTEIN” |
| 480 | 1alh | A | 210 | 290 | 6.80E−29 | 0.38 | 0.96 | | “QGSR ZINC FINGER | “COMPLEX (ZINC FINGER/DNA) |
| | | | | | | | | | PEPTIDE; CHAIN: A; | COMPLEX (ZINC FINGER/DNA), ZINC |
| | | | | | | | | | DUPLEX | FINGER, DNA-BINDING PROTEIN” |
| | | | | | | | | | OLIGONUCLEOTIDE | |
| | | | | | | | | | BINDING SITE; CHAIN: B, | |
| | | | | | | | | | C;” | |
| 480 | 1alh | A | 188 | 262 | 6.80E−23 | −0.21 | 0.13 | | “QGSR ZINC FINGER | “COMPLEX (ZINC FINGER/DNA) |
| | | | | | | | | | PEPTIDE; CHAIN: A; | COMPLEX (ZINC FINGER/DNA), ZINC |
| | | | | | | | | | DUPLEX | FINGER, DNA-BINDING PROTEIN” |
| | | | | | | | | | OLIGONUCLEOTIDE | |
| | | | | | | | | | BINDING SITE; CHAIN: B, | |
| | | | | | | | | | C;” | |
| 480 | 1mey | C | 321 | 402 | 1.40E−50 | 0.19 | 1 | | “DNA; CHAIN: A, B, D, E; | “COMPLEX (ZINC FINGER/DNA) ZINC |
| | | | | | | | | | CONSENSUS ZINC FINGER | FINGER, PROTEIN-DNA INTERACTION, |
| | | | | | | | | | PROTEIN; CHAIN: C, F, G;” | PROTEIN DESIGN, 2 CRYSTAL |
| | | | | | | | | | | STRUCTURE, COMPLEX (ZINC |
| | | | | | | | | | | FINGER/DNA)” |
| 480 | 1mey | C | 349 | 430 | 1.40E−50 | 0.24 | 1 | | “DNA; CHAIN: A, B, D, E; | “COMPLEX (ZINC FINGER/DNA) ZINC |
| | | | | | | | | | CONSENSUS ZINC FINGER | FINGER, PROTEIN-DNA INTERACTION, |
| | | | | | | | | | PROTEIN; CHAIN: C, F, G;” | PROTEIN DESIGN, 2 CRYSTAL |
| | | | | | | | | | | STRUCTURE, COMPLEX (ZINC |
| | | | | | | | | | | FINGER/DNA)” |
| 480 | 1mey | C | 377 | 458 | 1.70E−50 | 0.17 | 1 | | “DNA; CHAIN: A, B, D, E; | “COMPLEX (ZINC FINGER/DNA) ZINC |
| | | | | | | | | | CONSENSUS ZINC FINGER | FINGER, PROTEIN-DNA INTERACTION, |
| | | | | | | | | | PROTEIN; CHAIN: C, F, G;” | PROTEIN DESIGN, 2 CRYSTAL |
| | | | | | | | | | | STRUCTURE, COMPLEX (ZINC |
| | | | | | | | | | | FINGER/DNA)” |
| 480 | 1mey | C | 433 | 514 | 1.70E−50 | 0.52 | 1 | | “DNA; CHAIN: A, B, D, E; | “COMPLEX (ZINC FINGER/DNA) ZINC |
| | | | | | | | | | CONSENSUS ZINC FINGER | FINGER, PROTEIN-DNA INTERACTION, |
| | | | | | | | | | PROTEIN; CHAIN: C, F, G;” | PROTEIN DESIGN, 2 CRYSTAL |
| | | | | | | | | | | STRUCTURE, COMPLEX (ZINC |
| | | | | | | | | | | FINGER/DNA)” |
| 480 | 1mey | C | 405 | 486 | 3.40E−50 | 0.42 | 1 | | “DNA; CHAIN: A, B, D, E; | “COMPLEX (ZINC FINGER/DNA) ZINC |
| | | | | | | | | | CONSENSUS ZINC FINGER | FINGER, PROTEIN-DNA INTERACTION, |
| | | | | | | | | | PROTEIN; CHAIN: C, F, G;” | PROTEIN DESIGN, 2 CRYSTAL |
| | | | | | | | | | | STRUCTURE, COMPLEX (ZINC |
| | | | | | | | | | | FINGER/DNA)” |
| 480 | 1mey | C | 293 | 374 | 8.50E−50 | 0.75 | 1 | | “DNA; CHAIN: A, B, D, E; | “COMPLEX (ZINC FINGER/DNA) ZINC |
| | | | | | | | | | CONSENSUS ZINC FINGER | FINGER, PROTEIN-DNA INTERACTION, |
| | | | | | | | | | PROTEIN; CHAIN: C, F, G;” | PROTEIN DESIGN, 2 CRYSTAL |
| | | | | | | | | | | STRUCTURE, COMPLEX (ZINC |
| | | | | | | | | | | FINGER/DNA)” |
| 480 | 1mey | C | 461 | 542 | 1.20E−49 | 0.54 | 1 | | “DNA; CHAIN: A, B, D, E; | “COMPLEX (ZINC FINGER/DNA) ZINC |
| | | | | | | | | | CONSENSUS ZINC FINGER | FINGER, PROTEIN-DNA INTERACTION, |
| | | | | | | | | | PROTEIN; CHAIN: C, F, G;” | PROTEIN DESIGN, 2 CRYSTAL |
| | | | | | | | | | | STRUCTURE, COMPLEX (ZINC |
| | | | | | | | | | | FINGER/DNA)” |
| 480 | 1mey | C | 265 | 346 | 6.80E−49 | 0.47 | 1 | | “DNA; CHAIN: A, B, D, E; | “COMPLEX (ZINC FINGER/DNA) ZINC |
| | | | | | | | | | CONSENSUS ZINC FINGER | FINGER, PROTEIN-DNA INTERACTION, |
| | | | | | | | | | PROTEIN; CHAIN: C, F, G;” | PROTEIN DESIGN, 2 CRYSTAL |
| | | | | | | | | | | STRUCTURE, COMPLEX (ZINC |
| | | | | | | | | | | FINGER/DNA)” |
| 480 | 1mey | C | 237 | 318 | 5.10E−48 | 0.54 | 1 | | “DNA; CHAIN: A, B, D, E; | “COMPLEX (ZINC FINGER/DNA) ZINC |
| | | | | | | | | | CONSENSUS ZINC FINGER | FINGER, PROTEIN-DNA INTERACTION, |
| | | | | | | | | | PROTEIN; CHAIN: C, F, G;” | PROTEIN DESIGN, 2 CRYSTAL |
| | | | | | | | | | | STRUCTURE, COMPLEX (ZINC |
| | | | | | | | | | | FINGER/DNA)” |
| 480 | 1mey | C | 209 | 290 | 6.80E−47 | 0.32 | 1 | | “DNA; CHAIN: A, B, D, E; | “COMPLEX (ZINC FINGER/DNA) ZINC |
| | | | | | | | | | CONSENSUS ZINC FINGER | FINGER, PROTEIN-DNA INTERACTION, |
| | | | | | | | | | PROTEIN; CHAIN: C, F, G;” | PROTEIN DESIGN, 2 CRYSTAL |
| | | | | | | | | | | STRUCTURE, COMPLEX (ZINC |
| | | | | | | | | | | FINGER/DNA)” |
| 480 | 1mey | C | 187 | 262 | 1.70E−40 | 0.08 | 0.74 | | “DNA; CHAIN: A, B, D, E; | “COMPLEX (ZINC FINGER/DNA) ZINC |
| | | | | | | | | | CONSENSUS ZINC FINGER | FINGER, PROTEIN-DNA INTERACTION, |
| | | | | | | | | | PROTEIN; CHAIN: C, F, G;” | PROTEIN DESIGN, 2 CRYSTAL |
| | | | | | | | | | | STRUCTURE, COMPLEX (ZINC |
| | | | | | | | | | | FINGER/DNA)” |
| 480 | 1mey | C | 161 | 234 | 5.10E−36 | −0.51 | 0.03 | | “DNA; CHAIN: A, B, D, E; | “COMPLEX (ZINC FINGER/DNA) ZINC |
| | | | | | | | | | CONSENSUS ZINC FINGER | FINGER, PROTEIN-DNA INTERACTION, |
| | | | | | | | | | PROTEIN; CHAIN: C, F, G;” | PROTEIN DESIGN, 2 CRYSTAL |
| | | | | | | | | | | STRUCTURE, COMPLEX (ZINC |
| | | | | | | | | | | FINGER/DNA)” |
| 480 | 1mey | C | 111 | 184 | 6.80E−35 | −0.15 | 0.03 | | “DNA; CHAIN: A, B, D, E; | “COMPLEX (ZINC FINGER/DNA) ZINC |
| | | | | | | | | | CONSENSUS ZINC FINGER | FINGER, PROTEIN-DNA INTERACTION, |
| | | | | | | | | | PROTEIN; CHAIN: C, F, G;” | PROTEIN DESIGN, 2 CRYSTAL |
| | | | | | | | | | | STRUCTURE, COMPLEX (ZINC |
| | | | | | | | | | | FINGER/DNA)” |
| 480 | 1mey | C | 405 | 487 | 1.70E−50 | | | 95.91 | “DNA; CHAIN: A, B, D, E; | “COMPLEX (ZINC FINGER/DNA) ZINC |
| | | | | | | | | | CONSENSUS ZINC FINGER | FINGER, PROTEIN-DNA INTERACTION, |
| | | | | | | | | | PROTEIN; CHAIN: C, F, G;” | PROTEIN DESIGN, 2 CRYSTAL |
| | | | | | | | | | | STRUCTURE, COMPLEX (ZINC |
| | | | | | | | | | | FINGER/DNA)” |
| 480 | 1sp2 | | 518 | 544 | 3.40E−07 | 0.23 | 0.7 | | SP1F2; CHAIN: NULL; | “ZINC FINGER TRANSCRIPTION FACTOR |
| | | | | | | | | | | SP1; ZINC FINGER, TRANSCRIPTION |
| | | | | | | | | | | ACTIVATION, SP1” |
| 480 | 1tf6 | A | 350 | 502 | 1.70E−38 | 0.15 | 0.93 | | “TFIIIA; CHAIN: A, D; 5S | “COMPLEX (TRANSCRIPTION |
| | | | | | | | | | RIBOSOMAL RNA GENE; | REGULATION/DNA) COMPLEX |
| | | | | | | | | | CHAIN: B, C, E, F;” | (TRANSCRIPTION REGULATION/DNA), |
| | | | | | | | | | | RNA POLYMERASE III, 2 TRANSCRIPTION |
| | | | | | | | | | | INITIATION, ZINC FINGER PROTEIN” |
| 480 | 1tf6 | A | 238 | 383 | 1.70E−37 | 0.16 | 0.96 | | “TFIIIA; CHAIN: A, D; 5S | “COMPLEX (TRANSCRIPTION |
| | | | | | | | | | RIBOSOMAL RNA GENE; | REGULATION/DNA) COMPLEX |
| | | | | | | | | | CHAIN: B, C, E, F;” | (TRANSCRIPTION REGULATION/DNA), |
| | | | | | | | | | | RNA POLYMERASE III, 2 TRANSCRIPTION |
| | | | | | | | | | | INITIATION, ZINC FINGER PROTEIN” |
| 480 | 1tf6 | A | 406 | 544 | 8.50E−37 | 0.38 | 1 | | “TFIIIA; CHAIN: A, D; 5S | “COMPLEX (TRANSCRIPTION |
| | | | | | | | | | RIBOSOMAL RNA GENE; | REGULATION/DNA) COMPLEX |
| | | | | | | | | | CHAIN: B, C, E, F;” | (TRANSCRIPTION REGULATION/DNA), |
| | | | | | | | | | | RNA POLYMERASE III, 2 TRANSCRIPTION |
| | | | | | | | | | | INITIATION, ZINC FINGER PROTEIN” |
| 480 | 1tf6 | A | 188 | 327 | 3.40E−34 | 0.22 | 0.33 | | “TFIIIA; CHAIN: A, D; 5S | “COMPLEX (TRANSCRIPTION |
| | | | | | | | | | RIBOSOMAL RNA GENE; | REGULATION/DNA) COMPLEX |
| | | | | | | | | | CHAIN: B, C, E, F;” | (TRANSCRIPTION REGULATION/DNA), |
| | | | | | | | | | | RNA POLYMERASE III, 2 TRANSCRIPTION |
| | | | | | | | | | | INITIATION, ZINC FINGER PROTEIN” |
| 480 | 1tf6 | A | 89 | 248 | 1.70E−25 | −0.53 | 0 | | “TFIIIA; CHAIN: A, D; 5S | “COMPLEX (TRANSCRIPTION |
| | | | | | | | | | RIBOSOMAL RNA GENE; | REGULATION/DNA) COMPLEX |
| | | | | | | | | | CHAIN: B, C, E, F;” | (TRANSCRIPTION REGULATION/DNA), |
| | | | | | | | | | | RNA POLYMERASE III, 2 TRANSCRIPTION |
| | | | | | | | | | | INITIATION, ZINC FINGER PROTEIN” |
| 480 | 1tf6 | A | 319 | 486 | 1.70E−38 | | | 105.3 | “TFIIIA; CHAIN: A, D; 5S | “COMPLEX (TRANSCRIPTION |
| | | | | | | | | | RIBOSOMAL RNA GENE; | REGULATION/DNA) COMPLEX |
| | | | | | | | | | CHAIN: B, C, E, F;” | (TRANSCRIPTION REGULATION/DNA), |
| | | | | | | | | | | RNA POLYMERASE III, 2 TRANSCRIPTION |
| | | | | | | | | | | INITIATION, ZINC FINGER PROTEIN” |
| 480 | 1ubd | C | 319 | 459 | 2.10E−52 | 0.05 | 0.74 | | “YY1; CHAIN: C; ADENO- | “COMPLEX (TRANSCRIPTION |
| | | | | | | | | | ASSOCIATED VIRUS P5 | REGULATION/DNA) YING-YANG 1; |
| | | | | | | | | | INITIATOR ELEMENT DNA; | TRANSCRIPTION INITIATION, INITIATOR |
| | | | | | | | | | CHAIN: A, B;” | ELEMENT, YY1, ZINC 2 FINGER PROTEIN, |
| | | | | | | | | | | DNA-PROTEIN RECOGNITION, 3 |
| | | | | | | | | | | COMPLEX (TRANSCRIPTION |
| | | | | | | | | | | REGULATION/DNA)” |
| 480 | 1ubd | C | 242 | 347 | 4.20E−51 | −0.02 | 1 | | “YY1; CHAIN: C; ADENO- | “COMPLEX (TRANSCRIPTION |
| | | | | | | | | | ASSOCIATED VIRUS P5 | REGULATION/DNA) YING-YANG 1; |
| | | | | | | | | | INITIATOR ELEMENT DNA; | TRANSCRIPTION INITIATION, INITIATOR |
| | | | | | | | | | CHAIN: A, B;” | ELEMENT, YY1, ZINC 2 FINGER PROTEIN, |
| | | | | | | | | | | DNA-PROTEIN RECOGNITION, 3 |
| | | | | | | | | | | COMPLEX (TRANSCRIPTION |
| | | | | | | | | | | REGULATION/DNA)” |
| 480 | 1ubd | C | 431 | 543 | 4.20E−51 | 0.52 | 1 | | “YY1; CHAIN: C; ADENO- | “COMPLEX (TRANSCRIPTION |
| | | | | | | | | | ASSOCIATED VIRUS P5 | REGULATION/DNA) YING-YANG 1; |
| | | | | | | | | | INITIATOR ELEMENT DNA; | TRANSCRIPTION INITIATION, INITIATOR |
| | | | | | | | | | CHAIN: A, B;” | ELEMENT, YY1, ZINC 2 FINGER PROTEIN, |
| | | | | | | | | | | DNA-PROTEIN RECOGNITION, 3 |
| | | | | | | | | | | COMPLEX (TRANSCRIPTION |
| | | | | | | | | | | REGULATION/DNA)” |
| 480 | 1ubd | C | 404 | 514 | 4.20E−50 | 0.06 | 1 | | “YY1; CHAIN: C; ADENO- | “COMPLEX (TRANSCRIPTION |
| | | | | | | | | | ASSOCIATED VIRUS P5 | REGULATION/DNA) YING-YANG 1; |
| | | | | | | | | | INITIATOR ELEMENT DNA; | TRANSCRIPTION INITIATION, INITIATOR |
| | | | | | | | | | CHAIN: A, B;” | ELEMENT, YY1, ZINC 2 FINGER PROTEIN, |
| | | | | | | | | | | DNA-PROTEIN RECOGNITION, 3 |
| | | | | | | | | | | COMPLEX (TRANSCRIPTION |
| | | | | | | | | | | REGULATION/DNA)” |
| 480 | 1ubd | C | 291 | 403 | 8.40E−50 | 0.28 | 1 | | “YY1; CHAIN: C; ADENO- | “COMPLEX (TRANSCRIPTION |
| | | | | | | | | | ASSOCIATED VIRUS P5 | REGULATION/DNA) YING-YANG 1; |
| | | | | | | | | | INITIATOR ELEMENT DNA; | TRANSCRIPTION INITIATION, INITIATOR |
| | | | | | | | | | CHAIN: A, B;” | ELEMENT, YY1, ZINC 2 FINGER PROTEIN, |
| | | | | | | | | | | DNA-PROTEIN RECOGNITION, 3 |
| | | | | | | | | | | COMPLEX (TRANSCRIPTION |
| | | | | | | | | | | REGULATION/DNA)” |
| 480 | 1ubd | C | 214 | 318 | 8.40E−47 | 0.1 | 0.87 | | “YY1; CHAIN: C; ADENO- | “COMPLEX (TRANSCRIPTION |
| | | | | | | | | | ASSOCIATED VIRUS P5 | REGULATION/DNA) YING-YANG 1; |
| | | | | | | | | | INITIATOR ELEMENT DNA; | TRANSCRIPTION INITIATION, INITIATOR |
| | | | | | | | | | CHAIN: A, B;” | ELEMENT, YY1, ZINC 2 FINGER PROTEIN, |
| | | | | | | | | | | DNA-PROTEIN RECOGNITION, 3 |
| | | | | | | | | | | COMPLEX (TRANSCRIPTION |
| | | | | | | | | | | REGULATION/DNA)” |
| 480 | 1ubd | C | 329 | 430 | 3.40E−36 | 0.45 | 1 | | “YY1; CHAIN: C; ADENO- | “COMPLEX (TRANSCRIPTION |
| | | | | | | | | | ASSOCIATED VIRUS P5 | REGULATION/DNA) YING-YANG 1; |
| | | | | | | | | | INITIATOR ELEMENT DNA; | TRANSCRIPTION INITIATION, INITIATOR |
| | | | | | | | | | CHAIN: A, B;” | ELEMENT, YY1, ZINC 2 FINGER PROTEIN, |
| | | | | | | | | | | DNA-PROTEIN RECOGNITION, 3 |
| | | | | | | | | | | COMPLEX (TRANSCRIPTION |
| | | | | | | | | | | REGULATION/DNA)” |
| 480 | 1ubd | C | 385 | 486 | 8.50E−35 | 0.22 | 1 | | “YY1; CHAIN: C; ADENO- | “COMPLEX (TRANSCRIPTION |
| | | | | | | | | | ASSOCIATED VIRUS P5 | REGULATION/DNA) YING-YANG 1; |
| | | | | | | | | | INITIATOR ELEMENT DNA; | TRANSCRIPTION INITIATION, INITIATOR |
| | | | | | | | | | CHAIN: A, B;” | ELEMENT, YY1, ZINC 2 FINGER PROTEIN, |
| | | | | | | | | | | DNA-PROTEIN RECOGNITION, 3 |
| | | | | | | | | | | COMPLEX (TRANSCRIPTION |
| | | | | | | | | | | REGULATION/DNA)” |
| 480 | 1ubd | C | 245 | 346 | 3.40E−34 | 0.27 | 1 | | “YY1; CHAIN: C; ADENO- | “COMPLEX (TRANSCRIPTION |
| | | | | | | | | | ASSOCIATED VIRUS P5 | REGULATION/DNA) YING-YANG 1; |
| | | | | | | | | | INITIATOR ELEMENT DNA; | TRANSCRIPTION INITIATION, INITIATOR |
| | | | | | | | | | CHAIN: A, B;” | ELEMENT, YY1, ZINC 2 FINGER PROTEIN, |
| | | | | | | | | | | DNA-PROTEIN RECOGNITION, 3 |
| | | | | | | | | | | COMPLEX (TRANSCRIPTION |
| | | | | | | | | | | REGULATION/DNA)” |
| 480 | 1ubd | C | 217 | 318 | 1.70E−33 | 0.12 | 0.86 | | “YY1; CHAIN: C; ADENO- | “COMPLEX (TRANSCRIPTION |
| | | | | | | | | | ASSOCIATED VIRUS P5 | REGULATION/DNA) YING-YANG 1; |
| | | | | | | | | | INITIATOR ELEMENT DNA; | TRANSCRIPTION INITIATION, INITIATOR |
| | | | | | | | | | CHAIN: A, B;” | ELEMENT, YY1, ZINC 2 FINGER PROTEIN, |
| | | | | | | | | | | DNA-PROTEIN RECOGNITION, 3 |
| | | | | | | | | | | COMPLEX (TRANSCRIPTION |
| | | | | | | | | | | REGULATION/DNA)” |
| 480 | 1ubd | C | 441 | 542 | 1.70E−33 | 0.48 | 1 | | “YY1; CHAIN: C; ADENO- | “COMPLEX (TRANSCRIPTION |
| | | | | | | | | | ASSOCIATED VIRUS P5 | REGULATION/DNA) YING-YANG 1; |
| | | | | | | | | | INITIATOR ELEMENT DNA; | TRANSCRIPTION INITIATION, INITIATOR |
| | | | | | | | | | CHAIN: A, B;” | ELEMENT, YY1, ZINC 2 FINGER PROTEIN, |
| | | | | | | | | | | DNA-PROTEIN RECOGNITION, 3 |
| | | | | | | | | | | COMPLEX (TRANSCRIPTION |
| | | | | | | | | | | REGULATION/DNA)” |
| 480 | 1ubd | C | 163 | 290 | 1.70E−30 | −0.15 | 0.03 | | “YY1; CHAIN: C; ADENO- | “COMPLEX (TRANSCRIPTION |
| | | | | | | | | | ASSOCIATED VIRUS P5 | REGULATION/DNA) YING-YANG 1; |
| | | | | | | | | | INITIATOR ELEMENT DNA; | TRANSCRIPTION INITIATION, INITIATOR |
| | | | | | | | | | CHAIN: A, B;” | ELEMENT, YY1, ZINC 2 FINGER PROTEIN, |
| | | | | | | | | | | DNA-PROTEIN RECOGNITION, 3 |
| | | | | | | | | | | COMPLEX (TRANSCRIPTION |
| | | | | | | | | | | REGULATION/DNA)” |
| 480 | 1ubd | C | 295 | 403 | 2.10E−52 | | | 88.54 | “YY1; CHAIN: C; ADENO- | “COMPLEX (TRANSCRIPTION |
| | | | | | | | | | ASSOCIATED VIRUS P5 | REGULATION/DNA) YING-YANG 1; |
| | | | | | | | | | INITIATOR ELEMENT DNA; | TRANSCRIPTION INITIATION, INITIATOR |
| | | | | | | | | | CHAIN: A, B;” | ELEMENT, YY1, ZINC 2 FINGER PROTEIN, |
| | | | | | | | | | | DNA-PROTEIN RECOGNITION, 3 |
| | | | | | | | | | | COMPLEX (TRANSCRIPTION |
| | | | | | | | | | | REGULATION/DNA)” |
| 480 | 2gli | A | 265 | 432 | 4.20E−66 | 0.02 | 0.94 | | “ZINC FINGER PROTEIN | “COMPLEX (DNA-BINDING |
| | | | | | | | | | GLI1; CHAIN: A; DNA; | PROTEIN/DNA) FIVE-FINGER GLI; GLI, |
| | | | | | | | | | CHAIN: C, D;” | ZINC FINGER, COMPLEX (DNA-BINDING |
| | | | | | | | | | | PROTEIN/DNA)” |
| 480 | 2gli | A | 349 | 516 | 2.10E−65 | 0.2 | 0.98 | | “ZINC FINGER PROTEIN | “COMPLEX (DNA-BINDING |
| | | | | | | | | | GLI1; CHAIN: A; DNA; | PROTEIN/DNA) FIVE-FINGER GLI; GLI, |
| | | | | | | | | | CHAIN: C, D;” | ZINC FINGER, COMPLEX (DNA-BINDING |
| | | | | | | | | | | PROTEIN/DNA)” |
| 480 | 2gli | A | 187 | 376 | 1.90E−60 | 0 | 0.66 | | “ZINC FINGER PROTEIN | “COMPLEX (DNA-BINDING |
| | | | | | | | | | GLI1; CHAIN: A; DNA; | PROTEIN/DNA) FIVE-FINGER GLI; GLI, |
| | | | | | | | | | CHAIN: C, D;” | ZINC FINGER, COMPLEX (DNA-BINDING |
| | | | | | | | | | | PROTEIN/DNA)” |
| 480 | 2gli | A | 329 | 457 | 8.50E−35 | 0.42 | 1 | | “ZINC FINGER PROTEIN | “COMPLEX (DNA-BINDING |
| | | | | | | | | | GLI1; CHAIN: A; DNA; | PROTEIN/DNA) FIVE-FINGER GLI; GLI, |
| | | | | | | | | | CHAIN: C, D;” | ZINC FINGER, COMPLEX (DNA-BINDING |
| | | | | | | | | | | PROTEIN/DNA)” |
| 480 | 2gli | A | 413 | 544 | 3.40E−34 | 0.42 | 1 | | “ZINC FINGER PROTEIN | “COMPLEX (DNA-BINDING |
| | | | | | | | | | GLI1; CHAIN: A; DNA; | PROTEIN/DNA) FIVE-FINGER GLI; GLI, |
| | | | | | | | | | CHAIN: C, D;” | ZINC FINGER, COMPLEX (DNA-BINDING |
| | | | | | | | | | | PROTEIN/DNA)” |
| 480 | 2gli | A | 209 | 345 | 3.40E−34 | 0.19 | 0.82 | | “ZINC FINGER PROTEIN | “COMPLEX (DNA-BINDING |
| | | | | | | | | | GLI1; CHAIN: A; DNA; | PROTEIN/DNA) FIVE-FINGER GLI; GLI, |
| | | | | | | | | | CHAIN: C, D;” | ZINC FINGER, COMPLEX (DNA-BINDING |
| | | | | | | | | | | PROTEIN/DNA)” |
| 480 | 2gli | A | 385 | 513 | 1.40E−33 | 0.37 | 0.99 | | “ZINC FINGER PROTEIN | “COMPLEX (DNA-BINDING |
| | | | | | | | | | GLI1; CHAIN: A; DNA; | PROTEIN/DNA) FIVE-FINGER GLI; GLI, |
| | | | | | | | | | CHAIN: C, D;” | ZINC FINGER, COMPLEX (DNA-BINDING |
| | | | | | | | | | | PROTEIN/DNA)” |
| 480 | 2gli | A | 273 | 404 | 5.10E−33 | 0.49 | 0.95 | | “ZINC FINGER PROTEIN | “COMPLEX (DNA-BINDING |
| | | | | | | | | | GLI1; CHAIN: A; DNA; | PROTEIN/DNA) FIVE-FINGER GLI; GLI, |
| | | | | | | | | | CHAIN: C, D;” | ZINC FINGER, COMPLEX (DNA-BINDING |
| | | | | | | | | | | PROTEIN/DNA)” |
| 480 | 2gli | A | 119 | 264 | 3.40E−27 | −0.4 | 0.17 | | “ZINC FINGER PROTEIN | “COMPLEX (DNA-BINDING |
| | | | | | | | | | GLI1; CHAIN: A; DNA; | PROTEIN/DNA) FIVE-FINGER GLI; GLI, |
| | | | | | | | | | CHAIN: C, D;” | ZINC FINGER, COMPLEX (DNA-BINDING |
| | | | | | | | | | | PROTEIN/DNA)” |
| 480 | 2gli | A | 349 | 488 | 4.20E−66 | | | 94.21 | “ZINC FINGER PROTEIN | “COMPLEX (DNA-BINDING |
| | | | | | | | | | GLI1; CHAIN: A; DNA; | PROTEIN/DNA) FIVE-FINGER GLI; GLI, |
| | | | | | | | | | CHAIN: C, D;” | ZINC FINGER, COMPLEX (DNA-BINDING |
| | | | | | | | | | | PROTEIN/DNA)” |
| 481 | 1alh | A | 350 | 438 | 8.50E−29 | −0.07 | 0.03 | | “QGSR ZINC FINGER | “COMPLEX (ZINC FINGER/DNA) |
| | | | | | | | | | PEPTIDE; CHAIN: A; | COMPLEX (ZINC FINGER/DNA), ZINC |
| | | | | | | | | | DUPLEX | FINGER, DNA-BINDING PROTEIN” |
| | | | | | | | | | OLIGONUCLEOTIDE | |
| | | | | | | | | | BINDING SITE; CHAIN: B, | |
| | | | | | | | | | C;” | |
| 481 | 1alh | A | 319 | 402 | 5.10E−26 | −0.49 | 0.19 | | “QGSR ZINC FINGER | “COMPLEX (ZINC FINGER/DNA) |
| | | | | | | | | | PEPTIDE; CHAIN: A; | COMPLEX (ZINC FINGER/DNA), ZINC |
| | | | | | | | | | DUPLEX | FINGER, DNA-BINDING PROTEIN” |
| | | | | | | | | | OLIGONUCLEOTIDE | |
| | | | | | | | | | BINDING SITE; CHAIN: B, | |
| | | | | | | | | | C;” | |
| 481 | 1alh | A | 551 | 635 | 1.70E−24 | −0.23 | 0.4 | | “QGSR ZINC FINGER | “COMPLEX (ZINC FINGER/DNA) |
| | | | | | | | | | PEPTIDE; CHAIN: A; | COMPLEX (ZINC FINGER/DNA), ZINC |
| | | | | | | | | | DUPLEX | FINGER, DNA-BINDING PROTEIN” |
| | | | | | | | | | OLIGONUCLEOTIDE | |
| | | | | | | | | | BINDING SITE; CHAIN: B, | |
| | | | | | | | | | C;” | |
| 481 | 1alh | A | 579 | 660 | 3.40E−19 | −0.02 | 0 | | “QGSR ZINC FINGER | “COMPLEX (ZINC FINGER/DNA) |
| | | | | | | | | | PEPTIDE; CHAIN: A; | COMPLEX (ZINC FINGER/DNA), ZINC |
| | | | | | | | | | DUPLEX | FINGER, DNA-BINDING PROTEIN” |
| | | | | | | | | | OLIGONUCLEOTIDE | |
| | | | | | | | | | BINDING SITE; CHAIN: B, | |
| | | | | | | | | | C;” | |
| 481 | 1alh | A | 444 | 573 | 1.40E−18 | 0.12 | −0.17 | | “QGSR ZINC FINGER | “COMPLEX (ZINC FINGER/DNA) |
| | | | | | | | | | PEPTIDE; CHAIN: A; | COMPLEX (ZINC FINGER/DNA), ZINC |
| | | | | | | | | | DUPLEX | FINGER, DNA-BINDING PROTEIN” |
| | | | | | | | | | OLIGONUCLEOTIDE | |
| | | | | | | | | | BINDING SITE; CHAIN: B, | |
| | | | | | | | | | C;” | |
| 481 | 1alh | A | 307 | 375 | 2.10E−07 | −0.02 | 0.13 | | “QGSR ZINC FINGER | “COMPLEX (ZINC FINGER/DNA) |
| | | | | | | | | | PEPTIDE; CHAIN: A; | COMPLEX (ZINC FINGER/DNA), ZINC |
| | | | | | | | | | DUPLEX | FINGER, DNA-BINDING PROTEIN” |
| | | | | | | | | | OLIGONUCLEOTIDE | |
| | | | | | | | | | BINDING SITE; CHAIN: B, | |
| | | | | | | | | | C;” | |
| 481 | 1bbo | | 321 | 372 | 1.00E−07 | −0.63 | 0.05 | | | “DNA-BINDING PROTEIN HUMAN |
| | | | | | | | | | | ENHANCER-BINDING PROTEIN MBP-1 |
| | | | | | | | | | | MUTANT WITH CYS 11 1BBO 3 REPLACED |
| | | | | | | | | | | BY ABU (C11ABU) (NMR, 60 |
| | | | | | | | | | | STRUCTURES) 1BBO 4” |
| 481 | 1mey | C | 350 | 437 | 5.10E−47 | −0.12 | 0.19 | | “DNA; CHAIN: A, B, D, E; | “COMPLEX (ZINC FINGER/DNA) ZINC |
| | | | | | | | | | CONSENSUS ZINC FINGER | FINGER, PROTEIN-DNA INTERACTION, |
| | | | | | | | | | PROTEIN; CHAIN: C, F, G;” | PROTEIN DESIGN, 2 CRYSTAL |
| | | | | | | | | | | STRUCTURE, COMPLEX (ZINC |
| | | | | | | | | | | FINGER/DNA)” |
| 481 | 1mey | C | 377 | 469 | 1.70E−45 | −0.34 | 0.28 | | “DNA; CHAIN: A, B, D, E; | “COMPLEX (ZINC FINGER/DNA) ZINC |
| | | | | | | | | | CONSENSUS ZINC FINGER | FINGER, PROTEIN-DNA INTERACTION, |
| | | | | | | | | | PROTEIN; CHAIN: C, F, G;” | PROTEIN DESIGN, 2 CRYSTAL |
| | | | | | | | | | | STRUCTURE, COMPLEX (ZINC |
| | | | | | | | | | | FINGER/DNA)” |
| 481 | 1mey | C | 551 | 634 | 1.70E−39 | −0.2 | 0.24 | | “DNA; CHAIN: A, B, D, E; | “COMPLEX (ZINC FINGER/DNA) ZINC |
| | | | | | | | | | CONSENSUS ZINC FINGER | FINGER, PROTEIN-DNA INTERACTION, |
| | | | | | | | | | PROTEIN; CHAIN: C, F, G;” | PROTEIN DESIGN, 2 CRYSTAL |
| | | | | | | | | | | STRUCTURE, COMPLEX (ZINC |
| | | | | | | | | | | FINGER/DNA)” |
| 481 | 1mey | C | 443 | 573 | 5.10E−34 | 0.24 | −0.03 | | “DNA; CHAIN: A, B, D, E; | “COMPLEX (ZINC FINGER/DNA) ZINC |
| | | | | | | | | | CONSENSUS ZINC FINGER | FINGER, PROTEIN-DNA INTERACTION, |
| | | | | | | | | | PROTEIN; CHAIN: C, F, G;” | PROTEIN DESIGN, 2 CRYSTAL |
| | | | | | | | | | | STRUCTURE, COMPLEX (ZINC |
| | | | | | | | | | | FINGER/DNA)” |
| 481 | 1mey | G | 288 | 315 | 6.80E−13 | −0.31 | 0.11 | | “DNA; CHAIN: A, B, D, E; | “COMPLEX (ZINC FINGER/DNA) ZINC |
| | | | | | | | | | CONSENSUS ZINC FINGER | FINGER, PROTEIN-DNA INTERACTION, |
| | | | | | | | | | PROTEIN; CHAIN: C, F, G;” | PROTEIN DESIGN, 2 CRYSTAL |
| | | | | | | | | | | STRUCTURE, COMPLEX (ZINC |
| | | | | | | | | | | FINGER/DNA)” |
| 481 | 1mey | G | 316 | 345 | 1.40E−11 | 0.03 | −0.15 | | “DNA; CHAIN: A, B, D, E; | “COMPLEX (ZINC FINGER/DNA) ZINC |
| | | | | | | | | | CONSENSUS ZINC FINGER | FINGER, PROTEIN-DNA INTERACTION, |
| | | | | | | | | | PROTEIN; CHAIN: C, F, G;” | PROTEIN DESIGN, 2 CRYSTAL |
| | | | | | | | | | | STRUCTURE, COMPLEX (ZINC |
| | | | | | | | | | | FINGER/DNA)” |
| 481 | 1mey | G | 346 | 374 | 1.70E−11 | 0.15 | 0.22 | | “DNA; CHAIN: A, B, D, E; | “COMPLEX (ZINC FINGER/DNA) ZINC |
| | | | | | | | | | CONSENSUS ZINC FINGER | FINGER, PROTEIN-DNA INTERACTION, |
| | | | | | | | | | PROTEIN; CHAIN: C, F, G;” | PROTEIN DESIGN, 2 CRYSTAL |
| | | | | | | | | | | STRUCTURE, COMPLEX (ZINC |
| | | | | | | | | | | FINGER/DNA)” |
| 481 | 1tf3 | A | 378 | 469 | 1.70E−18 | −0.01 | 0.52 | | “TRANSCRIPTION FACTOR | “COMPLEX (TRANSCRIPTION |
| | | | | | | | | | IIIA; CHAIN: A; 5S RNA | REGULATION/DNA) TFIIIA; 5S GENE; |
| | | | | | | | | | GENE; CHAIN: E, F;” | NMR, TFIIIA, PROTEIN, DNA, |
| | | | | | | | | | | TRANSCRIPTION FACTOR, 5S RNA 2 |
| | | | | | | | | | | GENE, DNA BINDING PROTEIN, ZINC |
| | | | | | | | | | | FINGER, COMPLEX 3 (TRANSCRIPTION |
| | | | | | | | | | | REGULATION/DNA)” |
| 481 | 1tf3 | A | 551 | 640 | 1.70E−15 | 0.1 | 0.83 | | “TRANSCRIPTION FACTOR | “COMPLEX (TRANSCRIPTION |
| | | | | | | | | | IIIA; CHAIN: A; 5S RNA | REGULATION/DNA) TFIIIA; 5S GENE; |
| | | | | | | | | | GENE; CHAIN: E, F;” | NMR, TEIIIA, PROTEIN, DNA, |
| | | | | | | | | | | TRANSCRIPTION FACTOR, 5S RNA 2 |
| | | | | | | | | | | GENE, DNA BINDING PROTEIN, ZINC |
| | | | | | | | | | | FINGER, COMPLEX 3 (TRANSCRIPTION |
| | | | | | | | | | | REGULATION/DNA)” |
| 481 | 1tf3 | A | 473 | 604 | 5.10E−08 | 0.04 | −0.19 | | “TRANSCRIPTION FACTOR | “COMPLEX (TRANSCRIPTION |
| | | | | | | | | | IIIA; CHAIN: A, 5S RNA | REGULATION/DNA) TFIIIA; 5S GENE; |
| | | | | | | | | | GENE; CHAIN: E, F;” | NMR, TFIIIA, PROTEIN, DNA, |
| | | | | | | | | | | TRANSCRIPTION FACTOR, 5S RNA 2 |
| | | | | | | | | | | GENE, DNA BINDING PROTEIN, ZINC |
| | | | | | | | | | | FINGER, COMPLEX 3 (TRANSCRIPTION |
| | | | | | | | | | | REGULATION(DNA)” |
| 481 | 1tf6 | A | 352 | 499 | 1.40E−28 | 0.01 | −0.01 | | “TFIIIA; CHAIN: A, D; 5S | “COMPLEX (TRANSCRIPTION |
| | | | | | | | | | RIBOSOMAL RNA GENE; | REGULATION/DNA) COMPLEX |
| | | | | | | | | | CHAIN: B, C, E, F;” | (TRANSCRIPTION REGULATION/DNA), |
| | | | | | | | | | | RNA POLYMERASE III, 2 TRANSCRIPTION |
| | | | | | | | | | | INITIATION, ZINC FINGER PROTEIN” |
| 481 | 1tf6 | A | 319 | 469 | 8.50E−28 | −0.5 | 0 | | “TFIIIA; CHAIN: A, D; 5S | “COMPLEX (TRANSCRIPTION |
| | | | | | | | | | RIBOSOMAL RNA GENE; | REGULATION/DNA) COMPLEX |
| | | | | | | | | | CHAIN: B, C, E, F;” | (TRANSCRIPTION REGULATION/DNA), |
| | | | | | | | | | | RNA POLYMERASE III, 2 TRANSCRIPTION |
| | | | | | | | | | | INITIATION, ZINC FINGER PROTEIN” |
| 481 | 1tf6 | A | 378 | 584 | 5.10E−23 | −0.25 | 0.03 | | “TFIIIA; CHAIN: A, D; 5S | “COMPLEX (TRANSCRIPTION |
| | | | | | | | | | RIBOSOMAL RNA GENE; | REGULATION/DNA) COMPLEX |
| | | | | | | | | | CHAIN: B, C, E, F;” | (TRANSCRIPTION REGULATION/DNA), |
| | | | | | | | | | | RNA POLYMERASE III, 2 TRANSCRIPTION |
| | | | | | | | | | | INITIATION, ZINC FINGER PROTEIN” |
| 481 | 1tf6 | A | 551 | 686 | 6.80E−22 | −0.08 | 0.68 | | “TFIIIA; CHAIN: A, D; 5S | “COMPLEX (TRANSCRIPTION |
| | | | | | | | | | RIBOSOMAL RNA GENE; | REGULATION/DNA) COMPLEX |
| | | | | | | | | | CHAIN: B, C, E, F;” | (TRANSCRIPTION REGULATION/DNA), |
| | | | | | | | | | | RNA POLYMERASE III, 2 TRANSCRIPTION |
| | | | | | | | | | | INITIATION, ZINC FINGER PROTEIN” |
| 481 | 1ubd | C | 266 | 374 | 3.40E−31 | −0.33 | 0.49 | | “YY1; CHAIN: C; ADENO- | “COMPLEX (TRANSCRIPTION |
| | | | | | | | | | ASSOCIATED VIRUS P5 | REGULATION/DNA) YING-YANG 1; |
| | | | | | | | | | INITIATOR ELEMENT DNA; | TRANSCRIPTION INITIATION, INITIATOR |
| | | | | | | | | | CHAIN: A, B;” | ELEMENT, YY1, ZINC 2 FINGER PROTEIN, |
| | | | | | | | | | | DNA-PROTEIN RECOGNITION, 3 |
| | | | | | | | | | | COMPLEX (TRANSCRIPTION |
| | | | | | | | | | | REGULATION/DNA)” |
| 481 | 1ubd | C | 551 | 633 | 3.40E−24 | −0.5 | 0.74 | | “YY1; CHAIN: C; ADENO- | “COMPLEX (TRANSCRIPTION |
| | | | | | | | | | ASSOCIATED VIRUS P5 | REGULATION/DNA) YING-YANG 1; |
| | | | | | | | | | INITIATOR ELEMENT DNA; | TRANSCRIPTION INITIATION, INITIATOR |
| | | | | | | | | | CHAIN: A, B;” | ELEMENT, YY1, ZINC 2 FINGER PROTEIN, |
| | | | | | | | | | | DNA-PROTEIN RECOGNITION, 3 |
| | | | | | | | | | | COMPLEX (TRANSCRIPTION |
| | | | | | | | | | | REGULATION/DNA)” |
| 481 | 1ubd | C | 556 | 652 | 5.10E−20 | −0.58 | 0.15 | | “YY1; CHAIN: C; ADENO- | “COMPLEX (TRANSCRIPTION |
| | | | | | | | | | ASSOCIATED VIRUS P5 | REGULATION/DNA) YING-YANG 1; |
| | | | | | | | | | INITIATOR ELEMENT DNA; | TRANSCRIPTION INITIATION, INITIATOR |
| | | | | | | | | | CHAIN: A, B;” | ELEMENT, YY1, ZINC 2 FINGER PROTEIN, |
| | | | | | | | | | | DNA-PROTEIN RECOGNITION, 3 |
| | | | | | | | | | | COMPLEX (TRANSCRIPTION |
| | | | | | | | | | | REGULATION/DNA)” |
| 481 | 1ubd | C | 448 | 603 | 5.10E−18 | 0.08 | −0.09 | | “YY1; CHAIN: C; ADENO- | “COMPLEX (TRANSCRIPTION |
| | | | | | | | | | ASSOCIATED VIRUS P5 | REGULATION/DNA) YING-YANG 1; |
| | | | | | | | | | INITIATOR ELEMENT DNA; | TRANSCRIPTION INITIATION, INITIATOR |
| | | | | | | | | | CHAIN: A, B;” | ELEMENT, YY1, ZINC 2 FINGER PROTEIN, |
| | | | | | | | | | | DNA-PROTEIN RECOGNITION, 3 |
| | | | | | | | | | | COMPLEX (TRANSCRIPTION |
| | | | | | | | | | | REGULATION/DNA)” |
| 481 | 2adr | | 413 | 471 | 5.10E−16 | −0.24 | 0.42 | | ADR1; CHAIN: NULL; | “TRANSCRIPTION REGULATION |
| | | | | | | | | | | TRANSCRIPTION REGULATION, ADR1, |
| | | | | | | | | | | ZINC FINGER, NMR” |
| 481 | 2adr | | 579 | 639 | 8.50E−12 | −0.48 | 0.47 | | ADR1; CHAIN: NULL; | “TRANSCRIPTION REGULATION |
| | | | | | | | | | | TRANSCRIPTION REGULATION, ADR1, |
| | | | | | | | | | | ZINC FINGER, NMR” |
| 481 | 2drp | A | 345 | 403 | 1.70E−08 | −0.34 | 0.27 | | | COMPLEX(TRANSCRIPTION |
| | | | | | | | | | | REGULATION/DNA) TRAMTRACK |
| | | | | | | | | | | PROTEIN (TWO ZINC-FINGER PEPTIDE) |
| | | | | | | | | | | COMPLEXED WITH 2DRP 3 DNA 2DRP 4 |
| 481 | 2gli | A | 266 | 404 | 1.70E−30 | −0.12 | 0.12 | | “ZINC FINGER PROTEIN | “COMPLEX (DNA-BINDING |
| | | | | | | | | | GLI1; CHAIN: A; DNA; | PROTEIN/DNA) FIVE-FINGER GLI; GLI, |
| | | | | | | | | | CHAIN: C, D;” | ZINC FINGER, COMPLEX (DNA-BINDING |
| | | | | | | | | | | PROTEIN/DNA)” |
| 481 | 2gli | A | 420 | 604 | 1.70E−20 | 0.02 | −0.08 | | “ZINC FINGER PROTEIN | “COMPLEX (DNA-BINDING |
| | | | | | | | | | GLI1; CHAIN: A; DNA; | PROTEIN/DNA) FIVE-FINGER GLI; GLI, |
| | | | | | | | | | CHAIN: C, D;” | ZINC FINGER, COMPLEX (DNA-BINDING |
| | | | | | | | | | | PROTEIN/DNA)” |
| 481 | 2gli | A | 385 | 575 | 3.40E−19 | 0.03 | 0.24 | | “ZINC FINGER PROTEIN | “COMPLEX (DNA-BINDING |
| | | | | | | | | | GLI1; CHAIN: A; DNA; | PROTEIN/DNA) FIVE-FINGER GLI; GLI, |
| | | | | | | | | | CHAIN: C, D;” | ZINC FINGER, COMPLEX (DNA-BINDING |
| | | | | | | | | | | PROTEIN/DNA)” |
| 484 | 1nkl | | 33 | 97 | 1.20E−18 | 0.41 | 0.95 | | NK-LYSIN; CHAIN: NULL; | “SAPOSIN FOLD SAPOSIN FOLD, |
| | | | | | | | | | | ANTIBACTERIAL PEPTIDE, |
| | | | | | | | | | | TUMOUROLYTIC PEPTIDE” |
| 485 | 1byu | A | 3 | 169 | 1.70E−26 | 0.28 | 0.58 | | “GTP-BINDING PROTEIN | “TRANSPORT PROTEIN TC4; GTPASE, |
| | | | | | | | | | RAN; CHAIN: A, B;” | NUCLEAR TRANSPORT, TRANSPORT |
| | | | | | | | | | | PROTEIN” |
| 485 | 1byu | B | 3 | 169 | 1.70E−26 | 0.36 | 0.52 | | “GTP-BINDING PROTEIN | “TRANSPORT PROTEIN TC4; GTPASE, |
| | | | | | | | | | RAN; CHAIN: A, B;” | NUCLEAR TRANSPORT, TRANSPORT |
| | | | | | | | | | | PROTEIN” |
| 485 | 1d5c | A | 3 | 169 | 3.40E−32 | 0.22 | 0.05 | | RAB6 GTPASE; CHAIN: A; | “ENDOCYTOSIS/EXOCYTOSIS G- |
| | | | | | | | | | | PROTEIN, GTPASE, RAB6, VESICULAR |
| | | | | | | | | | | TRAFFICKING” |
| 485 | 1e0s | A | 3 | 170 | 6.80E−52 | 1 | 1 | | ADP-RIBOSYLATION | “G PROTEIN, G PROTEIN, RAS, ARF, ARF6, |
| | | | | | | | | | FACTOR 6; CHAIN: A; | MEMBRANE TRAFFIC” |
| 485 | 1ek0 | A | 3 | 162 | 1.00E−33 | 0.13 | 0.21 | | GTP-BINDING PROTEIN | “ENDOCYTOSIS/EXOCYTOSIS G PROTEIN, |
| | | | | | | | | | YPT51; CHAIN: A; | VESICULAR TRAFFIC, GTP HYDROLYSIS, |
| | | | | | | | | | | YPT/RAB 2 PROTEIN, ENDOCYTOSIS, |
| | | | | | | | | | | HYDROLASE” |
| 485 | 1fnm | A | 10 | 139 | 3.40E−05 | −0.41 | 0.04 | | ELONGATION FACTOR G; | “TRANSLATION EF-G; BENT |
| | | | | | | | | | CHAIN: A; | CONFORMATION, VISIBLE DOMAIN III, |
| | | | | | | | | | | MUTATION HIS573ALA” |
| 485 | 1fzq | A | 3 | 168 | 1.00E−44 | 0.75 | 1 | | ADP-RIBOSYLATION | “SIGNALING PROTEIN ARF-LIKE |
| | | | | | | | | | FACTOR-LIKE PROTEIN 3; | PROTEIN 3, ARL3; PROTEIN-GDP |
| | | | | | | | | | CHAIN: A; | COMPLEX WITHOUT MAGNESIUM, ARF |
| | | | | | | | | | | FAMILY, RAS 2 SUPERFAMILY, G- |
| | | | | | | | | | | DOMAIN” |
| 485 | 1hur | A | 3 | 171 | 5.10E−55 | 1.03 | 1 | | “HUMAN ADP- | “PROTEIN TRANSPORT GDP-BINDING, |
| | | | | | | | | | RIBOSYLATION FACTOR 1; | MEMBRANE TRAFFICKIN, NON- |
| | | | | | | | | | 1HUR 5 CHAIN: A, B; 1HUR | MYRISTOYLATED 1HUR 16” |
| | | | | | | | | | 7” | |
| 485 | 1hur | A | 2 | 173 | 5.10E−55 | | | 81.42 | “HUMAN ADP- | “PROTEIN TRANSPORT GDP-BINDING, |
| | | | | | | | | | RIBOSYLATION FACTOR 1; | MEMBRANE TRAFFICKIN, NON- |
| | | | | | | | | | 1HUR 5 CHAIN: A, B; 1HUR | MYRISTOYLATED 1HUR 16” |
| | | | | | | | | | 7” | |
| 485 | 1rrp | C | 3 | 169 | 3.40E−26 | 0.41 | 0.22 | | “RAN; CHAIN: A, C; | “COMPLEX (SMALL GTPASE/NUCLEAR |
| | | | | | | | | | NUCLEAR PORE COMPLEX | PROTEIN) COMPLEX (SMALL |
| | | | | | | | | | PROTEIN NUP358; CHAIN: B, | GTPASE/NUCLEAR PROTEIN), SMALL |
| | | | | | | | | | D;” | GTPASE, 2 NUCLEAR TRANSPORT” |
| 485 | 1zbd | A | 3 | 169 | 1.50E−34 | 0.15 | 0.37 | | RAB-3A; CHAIN: A; | “COMPLEX (GTP-BINDING/EFFECTOR) |
| | | | | | | | | | RABPHILIN-3A; CHAIN: B; | RAS-RELATED PROTEIN RAB3A; |
| | | | | | | | | | | COMPLEX (GTP-BINDING/EFFECTOR), G |
| | | | | | | | | | | PROTEIN, EFFECTOR, RABCDR, 2 |
| | | | | | | | | | | SYNAPTIC EXOCYTOSIS, RAB PROTEIN, |
| | | | | | | | | | | RAB3A, RABPHILIN” |
| 485 | 3rab | A | 3 | 169 | 1.40E−35 | 0.02 | 0.29 | | RAB3A; CHAIN: A; | “HYDROLASE G PROTEIN, VESICULAR |
| | | | | | | | | | | TRAFFICKING, GTP HYDROLYSIS, RAB 2 |
| | | | | | | | | | | PROTEIN, NEUROTRANSMITTER |
| | | | | | | | | | | RELEASE, HYDROLASE” |
| 486 | 1alh | A | 99 | 179 | 3.40E−29 | −0.1 | 0.58 | | “QGSR ZINC FINGER | “COMPLEX (ZINC FINGER/DNA) |
| | | | | | | | | | PEPTIDE; CHAIN: A; | COMPLEX (ZINC FINGER/DNA), ZINC |
| | | | | | | | | | DUPLEX | FINGER, DNA-BINDING PROTEIN” |
| | | | | | | | | | OLIGONUCLEOTIDE | |
| | | | | | | | | | BINDING SITE; CHAIN: B, | |
| | | | | | | | | | C;” | |
| 486 | 1alh | A | 127 | 200 | 1.20E−25 | −0.36 | 0.21 | | “QGSR ZINC FINGER | “COMPLEX (ZINC FINGER/DNA) |
| | | | | | | | | | PEPTIDE; CHAIN: A; | COMPLEX (ZINC FINGER/DNA), ZINC |
| | | | | | | | | | DUPLEX | FINGER, DNA-BINDING PROTEIN” |
| | | | | | | | | | OLIGONUCLEOTIDE | |
| | | | | | | | | | BINDING SITE; CHAIN: B, | |
| | | | | | | | | | C;” | |
| 486 | 1alh | A | 91 | 151 | 5.10E−21 | −0.28 | 0.83 | | “QGSR ZINC FINGER | “COMPLEX (ZINC FINGER/DNA) |
| | | | | | | | | | PEPTIDE; CHAIN: A; | COMPLEX (ZINC FINGER/DNA), ZINC |
| | | | | | | | | | DUPLEX | FINGER, DNA-BINDING PROTEIN” |
| | | | | | | | | | OLIGONUCLEOTIDE | |
| | | | | | | | | | BINDING SITE; CHAIN: B, | |
| | | | | | | | | | C;” | |
| 486 | 1alh | A | 99 | 182 | 3.40E−29 | | | 59.69 | “QGSR ZINC FINGER | “COMPLEX (ZINC FINGER/DNA) |
| | | | | | | | | | PEPTIDE; CHAIN: A; | COMPLEX (ZINC FINGER/DNA), ZINC |
| | | | | | | | | | DUPLEX | FINGER, DNA-BINDING PROTEIN” |
| | | | | | | | | | OLIGONUCLEOTIDE | |
| | | | | | | | | | BINDING SITE; CHAIN: B, | |
| | | | | | | | | | C;” | |
| 486 | 1ard | | 99 | 127 | 1.10E−08 | −0.47 | 0.87 | | | “TRANSCRIPTION REGULATION YEAST |
| | | | | | | | | | | TRANSCRIPTION FACTOR ADR1 |
| | | | | | | | | | | (RESIDUES 102-130) 1ARD 3 (AMINO |
| | | | | | | | | | | TERMINAL ZINC FINGER DOMAIN) (NMR, |
| | | | | | | | | | | 10 STRUCTURES) 1ARD 4 (ADR1B) 1ARD |
| | | | | | | | | | | 5” |
| 486 | 1ard | | 99 | 127 | 3.40E−06 | −0.47 | 0.87 | | | “TRANSCRIPTION REGULATION YEAST |
| | | | | | | | | | | TRANSCRIPTION FACTOR ADR1 |
| | | | | | | | | | | (RESIDUES 102-130) 1ARD 3 (AMINO |
| | | | | | | | | | | TERMINAL ZINC FINGER DOMAIN) (NMR, |
| | | | | | | | | | | 10 STRUCTURES) 1ARD 4 (ADR1B) 1ARD |
| | | | | | | | | | | 5” |
| 486 | 1mey | C | 98 | 179 | 1.00E−49 | −0.01 | 0.84 | | “DNA; CHAIN: A, B, D, E; | “COMPLEX (ZINC FINGER/DNA) ZINC |
| | | | | | | | | | CONSENSUS ZINC FINGER | FINGER, PROTEIN-DNA INTERACTION, |
| | | | | | | | | | PROTEIN; CHAIN: C, F, G;” | PROTEIN DESIGN, 2 CRYSTAL |
| | | | | | | | | | | STRUCTURE, COMPLEX (ZINC |
| | | | | | | | | | | FINGER/DNA)” |
| 486 | 1mey | C | 126 | 200 | 1.50E−42 | −0.21 | 0.01 | | “DNA; CHAIN: A, B, D, E; | “COMPLEX (ZINC FINGER/DNA) ZINC |
| | | | | | | | | | CONSENSUS ZINC FINGER | FINGER, PROTEIN-DNA INTERACTION, |
| | | | | | | | | | PROTEIN; CHAIN: C, F, G;” | PROTEIN DESIGN, 2 CRYSTAL |
| | | | | | | | | | | STRUCTURE, COMPLEX (ZINC |
| | | | | | | | | | | FINGER/DNA)” |
| 486 | 1mey | C | 72 | 151 | 5.10E−37 | −0.12 | 0.15 | | “DNA; CHAIN: A, B, D, E; | “COMPLEX (ZINC FINGER/DNA) ZINC |
| | | | | | | | | | CONSENSUS ZINC FINGER | FINGER, PROTEIN-DNA INTERACTION, |
| | | | | | | | | | PROTEIN; CHAIN: C, F, G;” | PROTEIN DESIGN, 2 CRYSTAL |
| | | | | | | | | | | STRUCTURE, COMPLEX (ZINC |
| | | | | | | | | | | FINGER/DNA)” |
| 486 | 1mey | C | 98 | 180 | 1.00E−49 | | | 63.19 | “DNA; CHAIN: A, B, D, E; | “COMPLEX (ZINC FINGER/DNA) ZINC |
| | | | | | | | | | CONSENSUS ZINC FINGER | FINGER, PROTEIN-DNA INTERACTION, |
| | | | | | | | | | PROTEIN; CHAIN: C, F, G;” | PROTEIN DESIGN, 2 CRYSTAL |
| | | | | | | | | | | STRUCTURE, COMPLEX (ZINC |
| | | | | | | | | | | FINGER/DNA)” |
| 486 | 1tf3 | A | 89 | 151 | 6.80E−16 | −0.62 | 0.48 | | “TRANSCRIPTION FACTOR | “COMPLEX (TRANSCRIPTION |
| | | | | | | | | | IIIA; CHAIN: A; 5S RNA | REGULATION/DNA) TFIIIA; 5S GENE; |
| | | | | | | | | | GENE; CHAIN: E, F;” | NMR, TFIIIA, PROTEIN, DNA, |
| | | | | | | | | | | TRANSCRIPTION FACTOR, 5S RNA 2 |
| | | | | | | | | | | GENE, DNA BINDING PROTEIN, ZINC |
| | | | | | | | | | | FINGER, COMPLEX 3 (TRANSCRIPTION |
| | | | | | | | | | | REGULATION/DNA)” |
| 486 | 1tf3 | A | 98 | 184 | 1.70E−19 | | | 52.05 | “TRANSCRIPTION FACTOR | “COMPLEX (TRANSCRIPTION |
| | | | | | | | | | IIIA; CHAIN: A; 5S RNA | REGULATION/DNA) TFIIIA; 5S GENE; |
| | | | | | | | | | GENE; CHAIN: E, F;” | NMR, TFIIIA, PROTEIN, DNA, |
| | | | | | | | | | | TRANSCRIPTION FACTOR, 5S RNA 2 |
| | | | | | | | | | | GENE, DNA BINDING PROTEIN, ZINC |
| | | | | | | | | | | FINGER, COMPLEX 3 (TRANSCRIPTION |
| | | | | | | | | | | REGULATION/DNA)” |
| 486 | 1tf6 | A | 9 | 183 | 1.70E−25 | | | 51.78 | “TFIIIA; CHAIN: A, D; 5S | “COMPLEX (TRANSCRIPTION |
| | | | | | | | | | RIBOSOMAL RNA GENE; | REGULATION/DNA) COMPLEX |
| | | | | | | | | | CHAIN: B, C, E, F;” | (TRANSCRIPTION REGULATION/DNA), |
| | | | | | | | | | | RNA POLYMERASE III, 2 TRANSCRIPTION |
| | | | | | | | | | | INITIATION, ZINC FINGER PROTEIN” |
| 486 | 1ubd | C | 92 | 179 | 3.40E−31 | −0.13 | 0.82 | | “YY1; CHAIN: C; ADENO- | “COMPLEX (TRANSCRIPTION |
| | | | | | | | | | ASSOCIATED VIRUS P5 | REGULATION/DNA) YING-YANG 1; |
| | | | | | | | | | INITIATOR ELEMENT DNA; | TRANSCRIPTION INITIATION, INITIATOR |
| | | | | | | | | | CHAIN: A, B;” | ELEMENT, YY1, ZINC 2 FINGER PROTEIN, |
| | | | | | | | | | | DNA-PROTEIN RECOGNITION, 3 |
| | | | | | | | | | | COMPLEX (TRANSCRIPTION |
| | | | | | | | | | | REGULATION/DNA)” |
| 486 | 1ubd | C | 106 | 202 | 1.70E−29 | −0.37 | 0.07 | | “YY1; CHAIN: C; ADENO- | “COMPLEX (TRANSCRIPTION |
| | | | | | | | | | ASSOCIATED VIRUS P5 | REGULATION/DNA) YING-YANG 1; |
| | | | | | | | | | INITIATOR ELEMENT DNA; | TRANSCRIPTION INITIATION, INITIATOR |
| | | | | | | | | | CHAIN: A, B;” | ELEMENT, YY1, ZINC 2 FINGER PROTEIN, |
| | | | | | | | | | | DNA-PROTEIN RECOGNITION, 3 |
| | | | | | | | | | | COMPLEX (TRANSCRIPTION |
| | | | | | | | | | | REGULATION/DNA)” |
| 486 | 1ubd | C | 74 | 151 | 1.70E−21 | −0.44 | 0.05 | | “YY1; CHAIN: C; ADENO- | “COMPLEX (TRANSCRIPTION |
| | | | | | | | | | ASSOCIATED VIRUS P5 | REGULATION/DNA) YING-YANG 1; |
| | | | | | | | | | INITIATOR ELEMENT DNA; | TRANSCRIPTION INITIATION, INITIATOR |
| | | | | | | | | | CHAIN: A, B;” | ELEMENT, YY1, ZINC 2 FINGER PROTEIN, |
| | | | | | | | | | | DNA-PROTEIN RECOGNITION, 3 |
| | | | | | | | | | | COMPLEX (TRANSCRIPTION |
| | | | | | | | | | | REGULATION/DNA)” |
| 486 | 1ubd | C | 74 | 180 | 3.40E−31 | | | 64.55 | “YY1; CHAIN: C; ADENO- | “COMPLEX (TRANSCRIPTION |
| | | | | | | | | | ASSOCIATED VIRUS P5 | REGULATION/DNA) YING-YANG 1; |
| | | | | | | | | | INITIATOR ELEMENT DNA; | TRANSCRIPTION INITIATION, INITIATOR |
| | | | | | | | | | CHAIN: A, B;” | ELEMENT, YY1, ZINC 2 FINGER PROTEIN, |
| | | | | | | | | | | DNA-PROTEIN RECOGNITION, 3 |
| | | | | | | | | | | COMPLEX (TRANSCRIPTION |
| | | | | | | | | | | REGULATION/DNA)” |
| 486 | 2adr | | 127 | 184 | 1.70E−15 | −0.59 | 0.07 | | ADR1; CHAIN: NULL; | “TRANSCRIPTION REGULATION |
| | | | | | | | | | | TRANSCRIPTION REGULATION, ADR1, |
| | | | | | | | | | | ZINC FINGER, NMR” |
| 486 | 2adr | | 99 | 157 | 1.00E−16 | | | 50.07 | ADR1; CHAIN: NULL; | “TRANSCRIPTION REGULATION |
| | | | | | | | | | | TRANSCRIPTION REGULATION, ADR1, |
| | | | | | | | | | | ZINC FINGER, NMR” |
| 486 | 2gli | A | 89 | 202 | 1.00E−28 | −0.19 | 0.27 | | “ZINC FINGER PROTEIN | “COMPLEX (DNA-BINDING |
| | | | | | | | | | GLI1; CHAIN: A; DNA; | PROTEIN/DNA) FIVE-FINGER GLI; GLI, |
| | | | | | | | | | CHAIN: C, D;” | ZINC FINGER, COMPLEX (DNA-BINDING |
| | | | | | | | | | | PROTEIN/DNA)” |
| 486 | 2gli | A | 56 | 202 | 1.00E−28 | | | 53.72 | “ZINC FINGER PROTEIN | “COMPLEX (DNA-BINDING |
| | | | | | | | | | GLI1; CHAIN: A; DNA; | PROTEIN/DNA) FIVE-FINGER GLI; GLI, |
| | | | | | | | | | CHAIN: C, D;” | ZINC FINGER, COMPLEX (DNA-BINDING |
| | | | | | | | | | | PROTEIN/DNA)” |
| 488 | 1alh | A | 145 | 227 | 1.50E−28 | | | 78.47 | “QGSR ZINC FINGER | “COMPLEX (ZINC FINGER/DNA) |
| | | | | | | | | | PEPTIDE; CHAIN: A; | COMPLEX (ZINC FINGER/DNA), ZINC |
| | | | | | | | | | DUPLEX | FINGER, DNA-BINDING PROTEIN” |
| | | | | | | | | | OLIGONUCLEOTIDE | |
| | | | | | | | | | BINDING SITE; CHAIN: B, | |
| | | | | | | | | | C;” | |
| 488 | 1mey | C | 144 | 226 | 3.40E−48 | | | 96.09 | “DNA; CHAIN: A, B, D, E; | “COMPLEX (ZINC FINGER/DNA) ZINC |
| | | | | | | | | | CONSENSUS ZINC FINGER | FINGER, PROTEIN-DNA INTERACTION, |
| | | | | | | | | | PROTEIN; CHAIN: C, F, G;” | PROTEIN DESIGN, 2 CRYSTAL |
| | | | | | | | | | | STRUCTURE, COMPLEX (ZINC |
| | | | | | | | | | | FINGER/DNA)” |
| 488 | 1tf6 | A | 172 | 337 | 3.40E−35 | | | 109.42 | “TFIIIA; CHAIN: A, D; 5S | “COMPLEX (TRANSCRIPTION |
| | | | | | | | | | RIBOSOMAL RNA GENE; | REGULATION/DNA) COMPLEX |
| | | | | | | | | | CHAIN: B, C, B, F;” | (TRANSCRIPTION REGULATION/DNA), |
| | | | | | | | | | | RNA POLYMERASE III, 2 TRANSCRIPTION |
| | | | | | | | | | | INITIATION, ZINC FINGER PROTEIN” |
| 488 | 1ubd | C | 146 | 254 | 6.80E−34 | | | 93.51 | “YY1; CHAIN: C; ADENO- | “COMPLEX (TRANSCRIPTION |
| | | | | | | | | | ASSOCIATED VIRUS P5 | REGULATION/DNA) YING-YANG 1; |
| | | | | | | | | | INITIATOR ELEMENT DNA | TRANSCRIPTION INITIATION, INITIATOR |
| | | | | | | | | | CHAIN: A, B;” | ELEMENT, YY1, ZINC 2 FINGER PROTEIN, |
| | | | | | | | | | | DNA-PROTEIN RECOGNITION, 3 |
| | | | | | | | | | | COMPLEX (TRANSCRIPTION |
| | | | | | | | | | | REGULATION/DNA)” |
| 488 | 2gli | A | 111 | 255 | 1.70E−34 | | | 87.07 | “ZINC FINGER PROTEIN | “COMPLEX (DNA-BINDING |
| | | | | | | | | | GLI1; CHAIN: A; DNA; | PROTEIN/DNA) FIVE-FINGER GLI; GLI, |
| | | | | | | | | | CHAIN: C, D;” | ZINC FINGER, COMPLEX (DNA-BINDING |
| | | | | | | | | | | PROTEIN/DNA)” |

[0474] TABLE 6

| | Position of Predicted | | |
|---|---|---|---|
| SEQ ID NO: | Signal peptide | Maximum Score | Mean Score |
| 250 | 1-27 | 0.954 | 0.795 |
| 251 | 1-22 | 0.918 | 0.708 |
| 260 | 1-27 | 0.961 | 0.814 |
| 261 | 1-34 | 0.976 | 0.676 |
| 296 | 1-21 | 0.934 | 0.774 |
| 305 | 1-25 | 0.994 | 0.957 |
| 307 | 1-21 | 0.997 | 0.955 |
| 309 | 1-22 | 0.967 | 0.839 |
| 339 | 1-16 | 0.907 | 0.560 |
| 347 | 1-35 | 0.897 | 0.663 |
| 355 | 1-32 | 0.973 | 0.750 |
| 357 | 1-18 | 0.970 | 0.815 |
| 366 | 1-20 | 0.963 | 0.907 |
| 377 | 1-15 | 0.904 | 0.734 |
| 378 | 1-17 | 0.924 | 0.598 |
| 379 | 1-19 | 0.958 | 0.843 |
| 380 | 1-20 | 0.976 | 0.945 |
| 381 | 1-19 | 0.916 | 0.649 |
| 382 | 1-13 | 0.956 | 0.798 |
| 383 | 1-19 | 0.916 | 0.649 |
| 384 | 1-26 | 0.991 | 0.949 |
| 385 | 1-20 | 0.961 | 0.880 |
| 386 | 1-20 | 0.961 | 0.880 |
| 387 | 1-15 | 0.931 | 0.773 |
| 388 | 1-38 | 0.986 | 0.856 |
| 389 | 1-22 | 0.987 | 0.824 |
| 390 | 1-20 | 0.914 | 0.671 |
| 391 | 1-15 | 0.905 | 0.594 |
| 392 | 1-25 | 0.958 | 0.903 |
| 393 | 1-17 | 0.902 | 0.762 |
| 394 | 1-22 | 0.963 | 0.931 |
| 395 | 1-23 | 0.973 | 0.917 |
| 396 | 1-17 | 0.903 | 0.663 |
| 397 | 1-26 | 0.990 | 0.876 |
| 398 | 1-17 | 0.911 | 0.652 |
| 399 | 1-33 | 0.985 | 0.912 |
| 400 | 1-24 | 0.928 | 0.580 |
| 401 | 1-24 | 0.958 | 0.812 |
| 402 | 1-16 | 0.947 | 0.770 |
| 403 | 1-21 | 0.933 | 0.880 |
| 404 | 1-21 | 0.961 | 0.912 |
| 405 | 1-17 | 0.883 | 0.585 |
| 406 | 1-19 | 0.888 | 0.591 |
| 407 | 1-20 | 0.978 | 0.830 |
| 408 | 1-17 | 0.984 | 0.922 |
| 409 | 1-36 | 0.993 | 0.929 |
| 410 | 1-19 | 0.954 | 0.791 |
| 411 | 1-19 | 0.954 | 0.791 |
| 412 | 1-19 | 0.954 | 0.791 |
| 413 | 1-19 | 0.954 | 0.791 |
| 414 | 1-18 | 0.995 | 0.926 |
| 415 | 1-19 | 0.923 | 0.605 |
| 416 | 1-19 | 0.995 | 0.936 |
| 417 | 1-18 | 0.980 | 0.930 |
| 418 | 1-18 | 0.980 | 0.930 |
| 419 | 1-18 | 0.980 | 0.930 |
| 420 | 1-16 | 0.923 | 0.710 |
| 421 | 1-21 | 0.961 | 0.731 |
| 422 | 1-25 | 0.952 | 0.848 |
| 423 | 1-20 | 0.981 | 0.933 |
| 424 | 1-48 | 0.905 | 0.599 |
| 425 | 1-25 | 0.989 | 0.949 |
| 426 | 1-26 | 0.960 | 0.869 |
| 427 | 1-22 | 0.942 | 0.855 |
| 428 | 1-19 | 0.955 | 0.846 |
| 429 | 1-20 | 0.978 | 0.835 |
| 430 | 1-19 | 0.925 | 0.759 |
| 431 | 1-37 | 0.977 | 0.782 |
| 432 | 1-29 | 0.911 | 0.708 |
| 433 | 1-20 | 0.974 | 0.922 |
| 434 | 1-33 | 0.904 | 0.641 |
| 435 | 1-13 | 0.880 | 0.581 |
| 436 | 1-30 | 0.946 | 0.787 |
| 437 | 1-15 | 0.975 | 0.886 |
| 438 | 1-19 | 0.981 | 0.916 |
| 439 | 1-15 | 0.988 | 0.973 |
| 440 | 1-26 | 0.956 | 0.748 |
| 441 | 1-35 | 0.972 | 0.737 |

[0475] TABLE 7

| SEQ ID NO: | Chromsomal location |
|---|---|
| 1 | 19 |
| 2 | 17 |
| 4 | 17 |
| 6 | 10 |
| 7 | 17 |
| 8 | 1p36.33-p36.12 |
| 10 | 19p13.3 |
| 11 | 4q21-q23 |
| 12 | 17 |
| 13 | 1p36.33-p36.12 |
| 16 | 6 |
| 17 | 4q12-q21 |
| 19 | 5 |
| 20 | 17 |
| 22 | 2p16 |
| 24 | 17 |
| 25 | 11q13 |
| 26 | 5 |
| 27 | Xq28 |
| 28 | 12q23 |
| 29 | 12q23 |
| 30 | 7q34 |
| 31 | 17 |
| 34 | 17 |
| 35 | 5 |
| 36 | 17 |
| 37 | 17 |
| 38 | 17 |
| 39 | 7 |
| 41 | 17 |
| 42 | Xp11.3-p11.23 |
| 43 | 11p15.3-p15.1 |
| 47 | 10 |
| 48 | 2 |
| 49 | 20 |
| 51 | 19p13.3 |
| 52 | 9 |
| 53 | 10q24 |
| 54 | 10q24 |
| 55 | 3p26 |
| 57 | 15 |
| 58 | 21q11.1 |
| 59 | 5 |
| 60 | 1q42.12-q43 |
| 61 | 12p13 |
| 62 | 4 |
| 64 | Xp11.3-p11.23 |
| 65 | p21 |
| 66 | 17 |
| 67 | 14q32 |
| 68 | 11 |
| 69 | 17 |
| 71 | 19q13.1-q13.2 |
| 75 | 6 |
| 79 | 16 |
| 82 | 17 |
| 83 | 17q25 |
| 88 | 14 |
| 89 | 14 |
| 90 | 15 |
| 91 | 6 |
| 92 | 5 |
| 93 | 9 |
| 94 | 11 |
| 95 | 17 |
| 96 | 4 |
| 98 | 7q21-q22 |
| 99 | 1 |
| 102 | 19 |
| 103 | 20 |
| 106 | 17 |
| 108 | 12 |
| 110 | 14 |
| 112 | 3 |
| 113 | 17 |
| 115 | 5 |
| 116 | 17 |
| 117 | 15q14 |
| 118 | 12q22 |
| 120 | 16 |
| 122 | 21q22.3 |
| 125 | 12 |
| 127 | 6q22.1-23.3 |
| 129 | 17 |
| 130 | 17 |
| 131 | 15q21 |
| 132 | 20q11.2 |
| 133 | 1q23 |
| 134 | 1 |
| 135 | 17 |
| 136 | 18q12.1 |
| 137 | 1 |
| 138 | 1 |
| 139 | 1 |
| 140 | 19q13.2-q13.4 |
| 141 | 16 |
| 142 | 16 |
| 143 | 5 |
| 144 | 1p36.3-p36.2 |
| 146 | 2 |
| 147 | 17 |
| 149 | 17 |
| 150 | 2 |
| 153 | 7 |
| 154 | 17 |
| 155 | 7q22 |
| 156 | 1p36.1-p35 |
| 164 | 9q34 |
| 165 | 19p13.1 |
| 170 | 10 |
| 171 | 1 |
| 172 | 3p |
| 173 | 3q27 |
| 174 | 3q27 |
| 175 | 3q27 |
| 176 | 3 |
| 177 | 20 |
| 178 | 19 |
| 179 | 7q22.1 |
| 181 | 22q12.1-q12.3 |
| 185 | 13 |
| 186 | 11p15.5 |
| 187 | q23.1-24.3 |
| 188 | 7q21.1 |
| 189 | 11p15.5 |
| 191 | 17 |
| 193 | 14 |
| 195 | 2p12-q11 |
| 196 | 17 |
| 197 | 12q13.12-q13.13 |
| 201 | 4 |
| 204 | 17 |
| 206 | 19 |
| 209 | 15 |
| 213 | 7 |
| 216 | X |
| 217 | 6q14.1-15 |
| 220 | 9 |
| 224 | 5 |
| 225 | 1 |
| 226 | 19 |
| 227 | Xq28 |
| 229 | 17 |
| 230 | 3 |
| 232 | 17 |
| 235 | 5 |
| 236 | 19p13.3 |
| 237 | 17 |
| 238 | 17 |
| 240 | 2p12-q11 |
| 243 | 16 |
| 244 | 17 |

[0476] TABLE 8

| | | | Location | |
|---|---|---|---|---|
| | | | of first | |
| | | | nucleotide | Amino acid sequence (A = Alanine, C = Cysteine, D = Aspartic |
| | | Nucleotide | of codon | Acid, E = Glutamic Acid, F = Phenylalanine, G = Glycine, |
| | | location | corresp. | H = Histidine, I = Isoleucine, K = Lysine, L = Leucine, |
| | | corresp. to | to last | M = Methionine, N = Asparagine, P = Proline, Q = Glutamine, |
| SEQ | | first residue | residue of | R = Arginine, S = Serine, T = Threonine, V = Valine, |
| ID | | of peptide | peptide | W = Tryptophan, Y = Tyrosine, X = Unknown, * = Stop codon, / = possible |
| NO: | Method | sequence | sequence | nucleotide deletion, = possible nucleotide insertion) |
| 707 | A | 609 | 785 | LGLEHISSSGEKYYYNCRTEVSQWGKTPKSGLERGQRQKEANKM |
| | | | | AVNSFPKDRDYRREVMQATATSGFASGKSTSGDKPVSHSCTTPS |
| | | | | TSSASGLNPTSAPPTSASAGPCFSVFHSSPIP/TLTSGPKSS*T |
| | | | | IAVLLWKPRCSLIILMWT*SIINEVLTGDVTQASLQTIIHKCLT |
| | | | | AGPSVFKITSLISQAAQLSTQAQASNQSPMSLTSDASSPRIICF |
| | | | | SKE*GTPQT*\PVPIQTFGFSTPPVSSQPKVSTPVVKQGPVSQS |
| | | | | ATQQPVTADKQQGHEPVSPRSLQRSSSQRSPSPGPNHTSNSSNA |
| | | | | SNATVVPQNSSARSTCSLTP/VTSSTLQ*KSTTTIVEQKFHNGE |
| | | | | KPQRVAWKEDRDKKKQTRWQSTASQKIGITEER |
| 708 | A | 45 | 1078 | CWGRWGRGTPTPSPSPRDAEEKAGGGWGRDQAPTPRRGDEGSMG |
| | | | | AKESRIGFLSYEEALRRVTDVELKRLKDAFKRTCGLSYYMGQHC |
| | | | | FIREVLGDGVPPKVAEVIYCSFGGTSKGLHFNNLIVGLVLLTRG |
| | | | | KDEEKAKYIFSLFSSESGNYVIREEMERMLHVVDGKVPDTLRKC |
| | | | | FSEGEKVNYEKFRNWLFLNKDAFTFSRWLLSGGVYVTLTDDSDT |
| | | | | PTFYQTLAGVTHLEESDIIDLEKRYWLLKAQSRTGRFDLETFGP |
| | | | | LVSPPIRPSLSEGLFNAFDENRDNHIDFKEISCGLSACCRGPLA |
| | | | | ERQKFCFKVFDVDRG*VLSRVELRDNMGALLEVWKD |
| 709 | A | 276 | 2588 | NKHFSFQTPKKSHQKSLSFSKTTPRRISHTPQTPLYTPERLQKS |
| | | | | PAKMTPTKQAAFKESLKDSSSPGHDSPLDSKITPQKRHTQAGEG |
| | | | | TSLETKTPRTPKRQGTQPPGFLPNCTWPHSVNSSPESPSCPAPP |
| | | | | TSSTAQPRRECLTPIRDPLRTPPRAAAFMGTPQNQTHQQPHVLR |
| | | | | AARAEEPAQKLKDKAIKTPKRPGNSTVTSSPPVTPKKLFTSPLC |
| | | | | DVSKKSPFRKSKIECPSPGELDQKEPQMSPSVAASLSCPVPSTP |
| | | | | PELSQRATLDTVPPPPPSKVGKRCRKTSDP/MKEAS/SECQLDA |
| | | | | SATPGVGTADSPAAPTDSRDDQKGLSLSPQSPPERRGYPGPGLR |
| | | | | SDWHASSPLLITSDTEHVTLLSEAEHHGIGDLKSNVLSVEEGEG |
| | | | | LRTADAEKSSLSHPGIPPSPPSCGPGSPLMPSRDVHCTTDGRQC |
| | | | | QASAQLDNLPASAWHSTDSASPQTYEVELEMQASGLPKLRIKKI |
| | | | | DPSSSLEAEPLSKEESSLGEESFLPALSMPRASRSLSKPEPTYV |
| | | | | SPPCPRLSHSTPGK\TGGKPTSARPVPPPT/SPSSTPSPFQTDG |
| | | | | VPWTPSPKHSGKTTPDIIK\TGPGGRGRWAVAPAPLPGGARSVQ\ |
| | | | | PSWEPVTA*VRGQGPRP*TQHPQDAHLGGF*ARGSVPAPRPVA |
| | | | | SQE/PACLRPRKPLPGDSLG*VPGRESCWPRKKLTVEPKGSVT* |
| | | | | EKIQKLVRVKRGLQVGVHGSYPPRETKRCLFPAPPHLPAVPCGA |
| | | | | PSPASALQALTQSPLLFQGKTPSSQSKDPR |
| 710 | A | 2 | 1510 | EIELPCSEDLNLETLSQAHVYIIAGACLSLGFRFAGSENLSAFN |
| | | | | CLHKFAKDFMTYLSAPNASVTGPHNLETCLSVVLLSLAMVMAGS |
| | | | | GNLKVLQLCRFLHMKTGGEMNYGFHLAHHMALGLLFLGGGRYSL |
| | | | | STSNSSIAALLCALYPHFPAHSTDNRYHLQALRHLYVLAAEPRL |
| | | | | LVPVDVDTNTPCYALLEVTYKGTQWYEQTKEELMAPTLLPELHL |
| | | | | LKQIKVKGPRYWELLIDLSKGTQHLKSILSKDGVLYVKLRAGQL |
| | | | | SYKEDPMGWQSLLAQTVANRNSEARAFKPETISAFTSDPALLSF |
| | | | | AEYFCKPTVNMGQKQEILDLFSSVLYECVTQETPEMLPAYIAMD |
| | | | | QAIRRLGRREMSETSELWQIKLVLEFFSSRSHQERLQNHPKRGL |
| | | | | FMNSEFLPVVKCTIDNTLDQWLQVGGDMCVHAYLSGQPLEESQL |
| | | | | SMLACFLVYHSVPAPQHLPPIGLEGSTSFAELLFKFKQLKMPVR |
| | | | | ALLRLAPLLLGNPQPMVM |
| 707 | A | 609 | 785 | LGLEHISSSGEKYYYNCRTEVSQWGKTPKSGLERGQRQKEANKM |
| | | | | AVNSFPKDRDYRREVMQATATSGFASGKSTSGDKPVSHSCTTPS |
| | | | | TSSASGLNPTSAPPTSASAGPCFSVFHSSPIP/TLTSGPKSS*T |
| | | | | IAVLLWKPRCSLIILMWT*SIINEVLTGDVTQASLQTIIHKCLT |
| | | | | AGPSVFKITSLISQAAQLSTQAQASNQSPMSLTSDASSPRIICF |
| | | | | SKE*GTPQT*\PVPIQTFGFSTPPVSSQPKVSTPVVKQGPVSQS |
| | | | | ATQQPVTADKQQGHEPVSPRSLQRSSSQRSPSPGPNHTSNSSNA |
| | | | | SNATVVPQNSSARSTCSLTP/VTSSTLQ*KSTTTIVEQKFHNGE |
| | | | | KPQRVAWKEDRDKKKQTRWQSTASQKIGITEER |
| 711 | A | 536 | 126 | TPPVPTAKKQPAFPASYIPPSPPTPPVPVPPPTLPKQQSFCAKP |
| | | | | PPSPLSPVPSVVKQIASQFPPPPTPPAMESQPLKPVPANVAPQS |
| | | | | PPAVKAKPKWQPSSIPVPSPDFPPPPPESSKVFPPXPPXPVPAX |
| | | | | PXXPP |
| 712 | A | 1 | 1642 | MDYIRTDLTTAAPSPPRRLGPPPPGEQPPSGSGHVRPPGARPPH |
| | | | | RGGGRGGGGGDPAAPPARGGGGGGKARPPGGGAAPCEPGCQCRA |
| | | | | PMVSVSSERHPLYNRVKTGQIANCALPCHNPFFSQDERAFTVFW |
| | | | | IGLWSVLCFVSTFATVSTFLIDMERFKYPERPIIFLSACYLFVS |
| | | | | VGYLVRLVAGHEKVACSGGAPGAGGAGGAGGAAAGAGAAGAGAG |
| | | | | GPGGRGEYEELGAVEQHVRYETTGPALCTVVFLLVYFFGMASSI |
| | | | | WWVILSLTWFLAAGMKWGNEAIAGYSQYFHLAAWLVPSVKSIAV |
| | | | | LALSSVDGDPVAGICYVGNQSLDNLRGFVLAPLVIYLFIGTMFL |
| | | | | LAGFVSLFRIRSVIKQQDGPTKTHKLEKLMIRLGLFTVLYTVPA |
| | | | | AVVACLFYEQHNRPRWEATHNCPCLRDLQPDQARRPDYAVFML |
| | | | | KYFMCLVVGITSGVWVWSGKTLESWRSLCTRCCWASKGAAVGGG |
| | | | | AGATAAGGGGGPGGGGGGGPGGGGGPGGGGGSLYSDVS\TGLTW |
| | | | | RSGTASSVSYPK\QMPLSQV |
| 713 | A | 3 | 586 | GTIITPDEYTGKIMMLCEARPAVQKNMIFIDQNRVMLKYLFPLN |
| | | | | EIVVDFYDSLKSLSSGYASFDYEDAGYQTAELVKMDILLNGNTV |
| | | | | EELVTVVHKDKAHSIGKAICERLKDSLPRQLFEIAIQAAIGSKI |
| | | | | IARETVKAYRKNVLAKCYGGDITRKMKLLKRQAEGKKKLRKIGN |
| | | | | VEVPKDAFIKVLKTQSSK |
| 714 | A | 250 | 687 | AATSLPFRASTIASANSILRVGVMTSIHHFVFSKRVCCNFTSKT |
| | | | | YFMSQQSSRTCTDGGYQALPFSCSSVSPSQQQTQIKSVRPDYLL |
| | | | | VEPPHHMGPSFFASSGLHYDQ*PHHRLHLYWVFSARPWNGDLNP |
| | | | | SSAHDI*HE*PLHF |
| 715 | A | 1 | 2649 | MKILTKLGYSLITTAEWEIMHDKEKLCCPSSRRWPPPHPPPPWR |
| | | | | IAVRCPWQVIAIGNKQFQCLEALFQPSFLGMECCSIHKTTFNSI |
| | | | | MKCDVDICKDLYANTMQKEITALVPSTTKIKIIVPRPKHRYSVW |
| | | | | IGSSILASLSTFQQMWISKQESTLEDPPMGLTDIPEMKARGNKD |
| | | | | TRGLTAAKKPELSENQDNGHKRDQQSRRDGLGGSSRPPALKPRD |
| | | | | YNSHSALAEGPGVDEVDPVHHDGDDAVPALEAPGQAVLDEEGVA |
| | | | | EHKAVLLISEEDGAFTARADLEGHRRLRQPFPRLVTPNQNLFFR |
| | | | | LFRVSWHKSASVNNGESGTGLSTYGLSLRIFFPKLACQQVDSRG |
| | | | | PPGIKVRHDQDPGYMHHKFAIVDKRVLITGSLNWTTQAIQNNRE |
| | | | | NVLITEDDEYVRLFLEEFERIWEQFNPTNHDLPRGAFMSVVRIL |
| | | | | VWNRNFCYSTEKAQCLFQNTTEKSFDEDNRKSTQQRVVWTTQNA |
| | | | | SLTHSMPTVNCDNDSNNNNNNKTTVQSLDSKSFNRSCTVRPSFR |
| 707 | A | 609 | 785 | LGLEHISSSGEKYYYNCRTEVSQWGKTPKSGLERGQRQKEANKM |
| | | | | AVNSFPKDRDYRREVMQATATSGFASGKSTSGDKPVSHSCTTPS |
| | | | | TSSASGLNPTSAPPTSASAGPCFSVFHSSPIP/TLTSGPKSS*T |
| | | | | IAVLLWKPRCSLIILMWT*SIINEVLTGDVTQASLQTIIHKCLT |
| | | | | AGPSVFKITSLISQAAQLSTQAQASNQSPMSLTSDASSPRIICF |
| | | | | SKE*GTPQT*\PVPIQTFGFSTPPVSSQPKVSTPVVKQGPVSQS |
| | | | | ATQQPVTADKQQGHEPVSPRSLQRSSSQRSPSPGPNHTSNSSNA |
| | | | | SNATVVPQNSSARSTCSLTP/VTSSTLQ*KSTTTIVEQKFHNGE |
| | | | | KPQRVAWKEDRDKKKQTRWQSTASQKIGITEER |
| | | | | LWVETEQEEKINTPLDSLHWSGSDQTGTLVDASSVREPGAELAN |
| | | | | ATFLFFRLLTLARTVLIPIPLRKWGVQHLRAEESAGAVELAEVA |
| | | | | ESHDGIHGALETATGLRGTGDIAAYGPKPSVTEEAKSECQSMMS |
| | | | | LSTLCSSANIVQQDFLLQQLLDVFIRDKLMERRNRRTGRTEKAR |
| | | | | IWEVTDRTVRTWIGEAVARLLLTLACLQVDSRGSPVVGGVVGGG |
| | | | | ADHHAALRPAVRVVGRHGFEQHLLDGFAGKDRESADLGSDGQNG |
| | | | | QDLDWGGGCASAADGVTFSVPVTPHTFRHSYAMHMLYAGIPLKV |
| | | | | LQSLMGHKSISSTEVYTKVFALDVAARHRVQFAMPESDAVAMLK |
| | | | | QLY |
| 716 | A | 1 | 1297 | GLRHEVTLRVLLKDALLEPGAGVLSIYYLGKKFLGDLQPDGRIM |
| | | | | WQETGQTFNSPSAWATHCKKLVNPAKKSGCGWASVKYKGQKLDK |
| | | | | YKATWLRLHQLHTPATAADESPASEGEEEELMEEEEEDVLAGV |
| | | | | SAEDKSRRPLGKSPSEPAHPEATTPGKRVDSKIRVPVRYCMLGS |
| | | | | RLARNPHTLVEVTSFAAINKFQPFNVAVSSNVLFLLDFHSHLT |
| | | | | RSEVVGYLGGRWDVNSQMLTVLRAFPCRSRLGDAKTAAAIEEEI |
| | | | | YQSLFLRGLSLVGWYHSHPHSPALPSLQDIDAQMDYQLRLQGSS |
| | | | | NGFQPCLALLCSPYYSGNPGPESKISPFWVMPPPEQRPSDYGIP |
| | | | | MDVEMAYVQDSFLTNDILHEMMLLVEFYKGSPDLVRLQEPWSQE |
| | | | | HTYLDKLKISLASRTPKDQSLCHVLEQVCGVLKQGS |
| 717 | A | 2 | 219 | KLVTGVIAVAQKGVEGAGSIAAATGFVKKDQLGKNEEGAPQEGI |
| | | | | LEDMPVDPDNEAYEMPSEEGYQDYEPEA |
| 718 | A | 1 | 619 | IQVEQNR*HFYELSLEYVCKLQEIQERKKFEFVEPMLSFFQGMF |
| | | | | TFYHQGHELAKDFNHYKMELQINIQNTRNRFEGTRSEVEELMNK |
| | | | | IRQNPKDHKRASQFTAEGYLYVQEKRPAPFGSSWVKHYCMYRKA |
| | | | | AKKFNMIPFEHRSGGKLGDGEVFFLKECTKRHTDSIDRRFCFDI |
| | | | | EAADRPGVSLTMQAFSEEERKQWLEALGGK |
| 719 | A | 250 | 687 | AATSLPFRASTIASANSILRVGVMTSIHHFVFSKRVCCNFTSKT |
| | | | | YFMSQQSSRTCTDGGYQALPFSCSSVSPSQQQTQIKSVRPDYLL |
| | | | | VEPPHHMGPSFFASSGLHYDQ*PHHRLHLYWVFSARPWNGDLNP |
| | | | | SSAHDI*HE*PLHF |
| 720 | A | 32 | 370 | PGQCPGALAMKSRQKGKKKGSAKERVFGCDLQEHLQHSGQEVPQ |
| | | | | VLKSCAEFVEEYGVVDGIYRLSGVSSNIQKLRQEFESERKPDLR |
| | | | | RDVYLQDIHCVSSLCKAYFRELPDP |
| 721 | A | 2 | 403 | EFPRLPDPNVVFPPTPRRWNTQQDSTLERPKTLEFLPRPRPSAN |
| | | | | RQRLDPWWFVSPSHARSTSPANSSSTETPSNLDSCFASSSSTVE |
| | | | | ERPGLPALLPFQAGPLPPTERTLLDLDAEGQSQDSTVPLCRAEL |
| | | | | NT |
| 722 | A | 203 | 359 | ALRSCWKLCRSMSSAAGFCASRPGLLFLGLLLLPLVVAFASGKP |
| 707 | A | 609 | 785 | LGLEHISSSGEKYYYNCRTEVSQWGKTPKSGLERGQRQKEANKM |
| | | | | AVNSFPKDRDYRREVMQATATSGFASGKSTSGDKPVSHSCTTPS |
| | | | | TSSASGLNPTSAPPTSASAGPCFSVFHSSPIP/TLTSGPKSS*T |
| | | | | IAVLLWKPRCSLIILMWT*SIINEVLTGDVTQASLQTIIHKCLT |
| | | | | AGPSVFKITSLISQAAQLSTQAQASNQSPMSLTSDASSPRIICF |
| | | | | SKE*GTPQT*\PVPIQTFGFSTPPVSSQPKVSTPVVKQGPVSQS |
| | | | | ATQQPVTADKQQGHEPVSPRSLQRSSSQRSPSPGPNHTSNSSNA |
| | | | | SNATVVPQNSSARSTCSLTP/VTSSTLQ*KSTTTIVEQKFHNGE |
| | | | | KPQRVAWKEDRDKKKQTRWQSTASQKIGITEER |
| | | | | CIPWRPTP |
| 723 | A | 36 | 633 | TNELIHRPQPDSQQRFVPVPTPAKRSARAPSLPAGHLASLPATM |
| | | | | PNVLLPPKESNLFKRILKCYEQKQYKNGLKFCKMILSNPKFAEH |
| | | | | GETLAMKGLTLNCLGKKEEAYEFVRKGLRNDVKSHVCWHVYGLL |
| | | | | QRSDKKYDEAIKCYRNALKLDKDNLQILRDLSLLQIQMRDLEGY |
| | | | | RETRYQLLQLRPTQRASWIGYAI |
| 724 | A | 1784 | 674 | APTPTGQRVVRATPAQSAPVRLRRRSYDVNNPIPSNLKSEAKKA |
| | | | | AKILREFTEITSRNGPDKIIPAHVIAKAKGLAILSVIKAGFLVT |
| | | | | ARGGSGIVVARLPDGKWSAPSAIGIAGLGGGFEIGIEVSDLVII |
| | | | | LNYDRAVEAFAKGGNLTLGGNLTVAVGPLGRNLEGNVALRSSAA |
| | | | | VFTYCKSRGLFAGVSLEGSCLIERKETNRKFYCQDIRAYDILFG |
| | | | | DTPRPAQAEDLYEILDSFTEKYENEGQRINARKAAREQRKSSAK |
| | | | | ELPPKPLSRPQQSSAPVQLNSGSQSNRNEYKLYPGLSSYHERVG |
| | | | | NLNQPIEVTALYSFEGQQPGDLNFQAGDRITVISKTDSHFDWWE |
| | | | | GKLRGQTGIFPANYVTMN |
| 725 | A | 3 | 927 | CGGIRELEALATLYQKQNKYEQAEHFRKKSFKIHQKAIKKKGNL |
| | | | | YGFALLRRRALQLEELTLGKDTPDNARTLNELGVLYYLQNNLET |
| | | | | ADQFLKRSLEMRERVLGPDHPDCAQSLNNLAALCNEKKQYDKAE |
| | | | | ELYERALDIRRRALAPDHPSLAYTVKHLAILYKKMGKLDKAVPL |
| | | | | YELAVEIRQKSFGPKHPSVATALVNLAVLYSQMKKHVEALPLYE |
| | | | | RALKIYEDSLGRMHPRVGETLKNLAVLSYEGGDFEKAAELYKRA |
| | | | | [sequence omitted] |
| 726 | A | 242 | 1310 | FLSLFRKRLYMEVFEYTRPMMHPEPGKFYQINPEEYGHPNTWKE |
| | | | | SFQQLYKGAHVKPGFAEHFYSNPARYKGRENMLYYDTIEDALGG |
| | | | | VQEAHFDGLIFVHSGIYTDEWIYIESPITMIGAAPGKVADKVII |
| | | | | ENTRDSTFVFMEGSEDAYVGYMTIRFNPDDKSAQHHNAHHCLEI |
| | | | | TVNCSPIIDHCIIRSTCTVGSAVCVSGQGACPTIKHCNISDCE\ |
| | | | | NVG\IYITDHAHGNYTDG*LKFPIMPLAGIWVKNHGNPIIRRNH |
| | | | | IHHGRDVGVFTFDHGMGYFESCNIHRNRIAGFEVKAYANPTVVR |
| | | | | CEIHHGQTGGIYVHEKGRGQFIENKIYANNFAGVWITSNSDPTI |
| | | | | RGNSI |
| 727 | A | 297 | 554 | VKRHASSANQYKYGKNRAEEDARRYLVEKEKLEKEKETIRTELI |
| | | | | ALRQEKRELKEAIRSSPGAKLKALEEAVATLEAQCRAKEERR |
| 728 | A | 88 | 572 | PHGPKTMEEGGSTGSAGSDSSTSGSGGAQQRELERMAEVLVTGE |
| | | | | QLRLRLHEEKVIKDRRHHLKTYPNCFVAKELIDWLIEHKEASDR |
| | | | | ETAIKLMQKLADRGIIHHVCDEHKEFKDVKLFYRFRKDDGTFPL |
| | | | | DNEVKA/CYERTEAI*KVCSA*NPPCNLDL |
| 729 | A | 1344 | 776 | YSAVEFGPTDWLPQTLDSLPYVSQDCLDSGIGSLESQMSELWGV |
| 707 | A | 609 | 785 | LGLEHISSSGEKYYYNCRTEVSQWGKTPKSGLERGQRQKEANKM |
| | | | | AVNSFPKDRDYRREVMQATATSGFASGKSTSGDKPVSHSCTTPS |
| | | | | TSSASGLNPTSAPPTSASAGPCFSVFHSSPIP/TLTSGPKSS*T |
| | | | | IAVLLWKPRCSLIILMWT*SIINEVLTGDVTQASLQTIIHKCLT |
| | | | | AGPSVFKITSLISQAAQLSTQAQASNQSPMSLTSDASSPRIICF |
| | | | | SKE*GTPQT*\PVPIQTFGFSTPPVSSQPKVSTPVVKQGPVSQS |
| | | | | ATQQPVTADKQQGHEPVSPRSLQRSSSQRSPSPGPNHTSNSSNA |
| | | | | SNATVVPQNSSARSTCSLTP/VTSSTLQ*KSTTTIVEQKFHNGE |
| | | | | KPQRVAWKEDRDKKKQTRWQSTASQKIGITEER |
| | | | | RGGGPGEPGPPRAPYTGYSPYGSELPATAAFSAFGRAMGAGHFS |
| | | | | VPADYPPAPPAFPPREYWSEPYPLPPPTSVLQEPPVQSPGAGRS |
| | | | | PWGRAG/TPGQGAGQRVY*AVWCVSPAPGGGCDGALPTAPGPPA |
| | | | | AGCRDPLLQVPAPQ |
| 730 | A | 1 | 4491 | PSPEAGGGGGALKASSARAAAAGLLREAGSGGRERADWRRRQLR |
| | | | | KVRSVELDQLPEQPLFLAASPPASSTSPSPEPADAAGSGTGFQP |
| | | | | VAVPPPHGAASRRGAHLTESVAAPDSGASSPAAAEPGEKRAPAA |
| | | | | EPSPAAAPAGREMENKETLKGLHKMDDRPEERMIREKLKATCMP |
| | | | | AWKHEWLERRNRRGPVVVKPIPVKGDGSEMNHLAAESPGEVQAS |
| | | | | AASPASKGRRSPSPGNSPSGRTVKSESPGVRRKRVSPVPFQSGR |
| | | | | ITPPRRAPSPDGFSPYSPEETNRRVNKVMRARLYLLQQIGPNSF |
| | | | | LIGGDSPDNKYRVFIGPQNCSCAHGTFCIHLLFVMLRVFQLEPS |
| | | | | DPMLWRKTLKNFEVESLFQKYHSRRSSRIKAPSRNTIQKFVSRM |
| | | | | SNSHTLSSSSTSTSSSENSIKDEEEQMCPICLLGMLDEESLTVC |
| | | | | EDGCRNKLHHHCMSIWAEECRRNREPLICPLCRSKWRSHDFYSH |
| | | | | ELSSPVDSPSSLRAAQQQTVQQQPLAGSRRNQESNFNLTHYGTQ |
| | | | | QIPPAYKDLAEPWIQVFGMELVGCLFSRNWNVREMALRRLSHDV |
| | | | | SGALLLANGESTGNSGGSSGSSPSGGATRGFSQTSISGDVVEAC |
| | | | | CSVLSMVCADPVYKVYVAALKTLRAMLVYTPCHSLAERIKLQRL |
| | | | | LQPVVDTILVKCADANSRTSQLSISTLLELCKGQAGKLAVGREI |
| | | | | LKAGSIGIGGVDYVLNCILGNQTESNNWQELLGRLCLIDRLLLE |
| | | | | FPAEFYPHIVSTDVSQAEPVEIRYKKLLSLLTFALQSIDNSHSM |
| | | | | VGKLSRRIYLSSARMVTTVPHVFSKLLEMLSVSSVSTHFTRMRR |
| | | | | RLMAYADEVEIAEAIQLGVEDTLQRQQHNSFCRHLFPTTIWKPQ |
| | | | | RTVPLECTVHLEKTGKGLCATKLSASSEDISERLARISVGPSSS |
| | | | | TTTTTTTTEQPKPMVQTKGRPHSQCLNSSPLSHHSQLMFPALST |
| | | | | PSSSTPSVPAGTATDVSKHRLQGFIPCRIPSASPQTQRKFSLQF |
| | | | | HRNCPENKDSDKLSPVFTQSRPLPSSNIHRPKPSRPTPGNTSKQ |
| | | | | GDPSKNSMTLDLNSSSKCDDSFGCSSNSS/NCCYT\SDETVFTP |
| | | | | VEEKCRLDVNTELNSSIEDLLEASMPSSDTTVTFKSEVAVLSPE |
| | | | | KAENDDTYKDDVNHNQKCKEKMEAEEEEALAIAMAMSASQVALP |
| | | | | IVPQLQVENGEDIIIIQQDTPETLPGHTKAKQPYREDTEWLKGQ |
| | | | | QIGLGAFSSCYQAQDVGTGTLMAVKQGTYVRNTSSEQEEVVEAL |
| | | | | REEIRMMSHLNHPNIIRMLGATCEKSNYNLFIEWMAGGSVAHLL |
| | | | | SKYGAFKESVVINYTEQLLRGLSYLHENQIIHRDVKGANLLIDS |
| | | | | TGQRLRIADFGAAARLASKGTGAGEFQGQLLGTIAFMAPEVLRG |
| | | | | QQYGRSCDVWSVGCAIIEMACAKPPWNAEKHSNHLALIFKIASA |
| | | | | TTAPSIPSHLSPGLR\DVALRCL\ELQPQDRPPSRELLKHPVFR |
| 707 | A | 609 | 785 | LGLEHISSSGEKYYYNCRTEVSQWGKTPKSGLERGQRQKEANKM |
| | | | | AVNSFPKDRDYRREVMQATATSGFASGKSTSGDKPVSHSCTTPS |
| | | | | TSSASGLNPTSAPPTSASAGPCFSVFHSSPIP/TLTSGPKSS*T |
| | | | | IAVLLWKPRCSLIILMWT*SIINEVLTGDVTQASLQTIIHKCLT |
| | | | | AGPSVFKITSLISQAAQLSTQAQASNQSPMSLTSDASSPRIICF |
| | | | | SKE*GTPQT*\PVPIQTFGFSTPPVSSQPKVSTPVVKQGPVSQS |
| | | | | ATQQPVTADKQQGHEPVSPRSLQRSSSQRSPSPGPNHTSNSSNA |
| | | | | SNATVVPQNSSARSTCSLTP/VTSSTLQ*KSTTTIVEQKFHNGE |
| | | | | KPQRVAWKEDRDKKKQTRWQSTASQKIGITEER |
| | | | | TTW |
| 731 | A | 30 | 1060 | RSCPGLVVLGSPDMSEVKSRKKSGPKGAPAAEPGKRSEGGKTPV |
| | | | | ARSSGGGGWADPRTCLSLLSLGTCLGLAWFVFQQSEKFAKVENQ |
| | | | | YQLLKLETNEFQQLQSKISLISEKLESTESILQEATSSMSLMTQ |
| | | | | FEQEVSNLQDIMHDIQNNEEVLTQRMQSLNEKFQNITDFWKRSL |
| | | | | EEMNINTDIFKSEAKHIHSQVTVQINSAEQEIKLLTERLKDLED |
| | | | | STLRNIRTVKRQEEEDLLRVEEQLGSDTKAIEKLEEEQHALFAR |
| | | | | DEDLTNKLSDYEPKVEECKTHLPTIESAIHSVLRVSQDLIETEK |
| | | | | KMEDLTMQMFNMEDDMLKAVSEIMEMQKTLEGFFL |
| 732 | A | 30 | 1060 | RSCPGLVVLGSPDMSEVKSRKKSGPKGAPAAEPGKRSEGGKTPV |
| | | | | ARSSGGGGWADPRTCLSLLSLGTCLGLAWFVFQQSEKFAKVENQ |
| | | | | YQLLKLETNEFQQLQSKISLISEKLESTESILQEATSSMSLMTQ |
| | | | | FEQEVSNLQDIMHDIQNNEEVLTQRMQSLNEKFQNITDFWKRSL |
| | | | | EEMNINTDIFKSEAKHIHSQVTVQINSAEQEIKLLTERLKDLED |
| | | | | STLRNIRTVKRQEEEDLLRVEEQLGSDTKAIEKLEEEQHALFAR |
| | | | | DEDLTNKLSDYEPKVEECKTHLPTIESAIHSVLRVSQDLIETEK |
| | | | | KMEDLTMQMFNMEDDMLKAVSEIMEMQKTLEGFFL |
| 733 | A | 2 | 1148 | IVDRCGIPLKEAESLQVAVKASQMGAVSQSCEDSCGDSVLADTL |
| | | | | SSHDVPGSPTASLVTGGREGRGCSDVDPGIQGVVTDLAVSDAGE |
| | | | | KVECRNFPGSSQSEIIQAIQNLTRLLYSLQAALTIQDSHIEIHR |
| | | | | LVLQQQEGLSLGHSILRGGPLQDQKSRDADRQHEELANVHQLQH |
| | | | | QLQQEQRRWLRRCEQQQRAQATRESWLQERERECQSQEELLLRS |
| | | | | RGELDLQLQEYQHSLERLREGQRLVEREQARMRAQQSLLGHWKH |
| | | | | GRQRSLPAVLLPGGPEVMELNRSESLCHENSFFINEALVQMSFN |
| | | | | TFNKLNPSVIHQDATYPTTQSHSDLVRTSEHQVDLKVDPSQPSN |
| | | | | VSHKLWTAAGSGHQILPFHESSKDSCKNGN |
| 734 | A | 1 | 1063 | MPFYISDLSICGDRILRALCPQDLPTYSLHSRGKMRASCSRKFL |
| | | | | DNNSSRLVSCNMGALISIWGTTTPPLHATILDSQPTVHPPLAKD |
| | | | | CLPCGLQASASDLRARALQRLCQQLPWVGSQPHTRSPSPQRGGK |
| | | | | TGLFAGLASSVSMRPASPPSPAADSCSACRFFARRPPLRVTWVK |
| | | | | PSSALALCVSISDSIPGNLKALPAETRAQLHHAEASLSQPPLQL |
| | | | | RPFPKTSQAGDLQDLGPYVCVRKAVGKGDKQIRAVVKEHSVRSQ |
| | | | | ERIWHYPGITTANMPGHLGQNTESGRDKLPMFGVWFPGCRFWGL |
| | | | | WVWRLP*LKLAAPCRPSRSLRSSPISRRASTTRCLTVSGCPAAP |
| | | | | NL |
| 735 | A | 1 | 1277 | NEFTRRKHLELTATMQVEEATGQAAGRRRGNVVRRVFGRIRRFF |
| | | | | SRRRNEPTLPREFTRRGRRGAVSVDSLAELEDGALLLQTLQLSK |
| | | | | ISFPIGQRLLGSKRKMSLNPIAKQIPQVVEACCQFIEKHGLSAV |
| 707 | A | 609 | 785 | LGLEHISSSGEKYYYNCRTEVSQWGKTPKSGLERGQRQKEANKM |
| | | | | AVNSFPKDRDYRREVMQATATSGFASGKSTSGDKPVSHSCTTPS |
| | | | | TSSASGLNPTSAPPTSASAGPCFSVFHSSPIP/TLTSGPKSS*T |
| | | | | IAVLLWKPRCSLIILMWT*SIINEVLTGDVTQASLQTIIHKCLT |
| | | | | AGPSVFKITSLISQAAQLSTQAQASNQSPMSLTSDASSPRIICF |
| | | | | SKE*GTPQT*\PVPIQTFGFSTPPVSSQPKVSTPVVKQGPVSQS |
| | | | | ATQQPVTADKQQGHEPVSPRSLQRSSSQRSPSPGPNHTSNSSNA |
| | | | | SNATVVPQNSSARSTCSLTP/VTSSTLQ*KSTTTIVEQKFHNGE |
| | | | | KPQRVAWKEDRDKKKQTRWQSTASQKIGITEER |
| | | | | GIFTLEYSVQRVRQLREEFDQGLDVVLDDNQNVHDVAALLKEFF |
| | | | | RDMKDSLLPDDLYMSFLLTATLKPQDQLSALQLLVYLMPPCHSD |
| | | | | TLERLLKALHKITENCEDSIGIDGQLVPGNRMTSTNLALVFGSA |
| | | | | LLKKGKFGKRESRKTKLGIDHYVASVNVVRAMIDNWDVLFQVPP |
| | | | | HIQRQVAKRVWKSSPEALDFIRRRNLRKIQSARIKMEEDALLSD |
| | | | | PVETSAEARAAVLAQSKPSDEGSSEEPAVPSGTARSHDDEEGAG |
| | | | | NPPIPEQDRPLLRVPREKEAKTGVSYFFP |
| 736 | A | 40 | 317 | LRVTAQWASHTLPDPVVGNPGSGWKEKDRDSEWGWRDLKSKTWV |
| | | | | EVEAEGGLSGDTFQWLPQGSSQRPGLPLVNQGAGVQETKGAGPL* |
| | | | | SPAPLPPGSPEGAQASGCSPVGAIGMYPLTGPLPPPPQPRSWI |
| | | | | SGPSTPILSLCPSPSTRSQGFPPQGLEVCVTPIELLPEVRLKIR |
| | | | | ECFPSFL |
| 737 | A | 79 | 825 | LTSWLLSPAHRRAGRLSSTVESGVRCLVARRSCFHVLASPQVKR |
| | | | | EVMEGLSDVASFATKLKNTLIQYHSIEEDKWRVAKKTKDVTVWR |
| | | | | KPSEEFNGYLYKAQGVIDDLVYSIIDHIRPGPCRLDWDSLMTSL |
| | | | | DILENFEENCCVMRYTTAGQLWNIISPREFVDFSYTVGYKEGLL |
| | | | | SCGISLDWDEKRPEFVRGYNHPCGWFCVPLKDNPNQSLLTGYIQ |
| | | | | TDLRGMIPQSAVDTAMASTLTNFYGDLRK |
| 738 | A | 10 | 914 | GPGKETLESALIALDSEKPKKLRFHPKQLYFSARQGELQKVLLM |
| | | | | LVDGIDPNFKMEHQNKRSPLHAAAEAGHVDICHMLVQAGANIDT |
| | | | | CSEDQRTPLMEAAENNHLEAVKYLIKAGALVDPKDAEGSTCLHL |
| | | | | AAKKGHYEVVQYLLSNGQMDVNCQDDGGWTPMIWATEYKHVDLV |
| | | | | KLLLSKGSDINIRDNEENICLHWAAFSGCVDIAEILLAAKCDLH |
| | | | | AVNIHGDSPLHIAARENRYDCVVLFLSRDSDVPLKNKEGETPLQ |
| | | | | CASLNSQVWSALQMSKALQDSAPDRPSPVERIVSRDI |
| 739 | A | 10 | 914 | GPGKETLESALIALDSEKPKKLRFHPKQLYFSARQGELQKVLLM |
| | | | | LVDGIDPNFKMEHQNKRSPLHAAAEAGHVDICHMLVQAGANIDT |
| | | | | CSEDQRTPLMEAAENNHLEAVKYLIKAGALVDPKDAEGSTCLHL |
| | | | | AAKKGHYEVVQYLLSNGQMDVNCQDDGGWTPMIWATEYKHVDLV |
| | | | | KLLLSKGSDINIRDNEENICLHWAAFSGCVDIAEILLAAKCDLH |
| | | | | AVNIHGDSPLHIAARENRYDCVVLFLSRDSDVPLKNKEGETPLQ |
| | | | | CASLNSQVWSALQMSKALQDSAPDRPSPVERIVSRDI |
| 740 | A | 10 | 914 | GPGKETLESALIALDSEKPKKLRFHPKQLYFSARQGELQKVLLM |
| | | | | LVDGIDPNFKMEHQNKRSPLHAAAEAGHVDICHMLVQAGANIDT |
| | | | | CSEDQRTPLMEAAENNHLEAVKYLIKAGALVDPKDAEGSTCLHL |
| | | | | AAKKGHYEVVQYLLSNGQMDVNCQDDGGWTPMIWATEYKHVDLV |
| | | | | KLLLSKGSDINIRDNEENICLHWAAFSGCVDIAEILLAAKCDLH |
| | | | | AVNIHGDSPLHIAARENRYDCVVLFLSRDSDVPLKNKEGETPLQ |
| 707 | A | 609 | 785 | LGLEHISSSGEKYYYNCRTEVSQWGKTPKSGLERGQRQKEANKM |
| | | | | AVNSFPKDRDYRREVMQATATSGFASGKSTSGDKPVSHSCTTPS |
| | | | | TSSASGLNPTSAPPTSASAGPCFSVFHSSPIP/TLTSGPKSS*T |
| | | | | IAVLLWKPRCSLIILMWT*SIINEVLTGDVTQASLQTIIHKCLT |
| | | | | AGPSVFKITSLISQAAQLSTQAQASNQSPMSLTSDASSPRIICF |
| | | | | SKE*GTPQT*\PVPIQTFGFSTPPVSSQPKVSTPVVKQGPVSQS |
| | | | | ATQQPVTADKQQGHEPVSPRSLQRSSSQRSPSPGPNHTSNSSNA |
| | | | | SNATVVPQNSSARSTCSLTP/VTSSTLQ*KSTTTIVEQKFHNGE |
| | | | | KPQRVAWKEDRDKKKQTRWQSTASQKIGITEER |
| | | | | CASLNSQVWSALQMSKALQDSAPDRPSPVERIVSRDI |
| 741 | A | 1 | 1227 | MSRGPEEVNRLTESTYRNVMEQFNPGLRNLINLGKNYEKAVNAM |
| | | | | ILAGKAYYDGVAKIGEIATGSPVST*TGTCPHRDFKYPQETSTR |
| | | | | VFDGKFLKNSTKRLSMSWRRR*NLDVKYMNATLKRYQTEHKNKL |
| | | | | ESLEKSQAELKKIRRKSQGSRNALKYEHKEIEYVETVTSRQSEI |
| | | | | QKFIADGCKEALLEEKRRFCFLVDKHCGFANHIHYYHLQSAELL |
| | | | | NSKLPRWQETCVDAIKVPEKIMNMIEEIKTPASTPVSGTPQASP |
| | | | | MIERSNVVRKDYDTLSKCSPKMPPAPSGRAYTSPLIDMFNNPAT |
| | | | | AAPNSQRVNNSTGTSEDPSLQRSVSVATGLNMMKKQKVKTIFPH |
| | | | | TAGSNKTLLSFAQGDVITLLIPEEKDGWLYGEHDVSKARGWFPS |
| | | | | SYTKLLEENETEA |
| 742 | A | 27 | 800 | RFSSFSLIVSALASLNPVTMSDPEGETLRSTFPSYMAEGERLYL |
| | | | | CGEFSKAAQSFSNALYLQDGDKNCLVARSKCFLKMGDLERSLKD |
| | | | | AEASLQSDPAFCKGILQKAETLYTMGDFEFALVFYHRGYKLRPD |
| | | | | REFRVGIQKAQEAINNSVGSPSSIKLENKGDLSFLSKQAENIKA |
| | | | | QQKPQPMKHLLHPTKGEPKWKASLKSEKTVRQLLGELYVDKEYL |
| | | | | EKLLLDEGFGHFVGTGPWGKGNLGGCFMHELKAEPVI |
| 743 | A | 458 | 51 | AWAQCLPTSPPSCPRGSTSPLWPPLCWAFRAGHKGLGPSSAHDS |
| | | | | AGSPAWP*NLPEGQGGLCPPPDPAPAAAGTGPPGYCRWPGRASS |
| | | | | SPGRCGRWDWLWGCGCRGPRAAQVPHRAASGWPPAHTGSHRGAH |
| | | | | CLGA |
| 744 | A | 8 | 459 | DTLSLNCTLPETLPMTPSF*LSFL*FPGLARAKSIPTKTYSNEV |
| | | | | VTLWYRPPDILLGSTDYSTQIDMW*GQVEVWQGPCGKGGGLVTT |
| | | | | ATQPAAFLFTVPSLPRGVGCIFYEMATGRPLFPGSTVEEQLHFI |
| | | | | FRILSEEAWALCAVETHR |
| 745 | A | 1848 | 568 | CARVAAWGGKLRRGLAVSRQAVRSPGPLAAAVAGAALAGAGAAW |
| | | | | HHSRVSVAARDGSFTVSAQKNVEHGIIYIGKPSLRKQRFMQFSS |
| | | | | LEHEGEYYMTPRDFLFSVMFEQMERKTSVKKLTKKDIEDTLSGI |
| | | | | QTAGCGSTFFRDLGDKGLISYTEYLFLLTILTKPHSGFHVAFKM |
| | | | | LDTDGNEMIEKREFFKLQKIISKQDDLMTVKTNETGYQEAIVKE |
| | | | | PEINTTLQMRFFGKRGQRKLHYKEFRRFMENLQTEIQEMEFLQF |
| | | | | SKGLSFMRKEDFAEWLLFFTNTENKDIYWKNVREKLSAGESISL |
| | | | | DEFKSFCHFTTHLEDFAIAMQMFSLAHRPVRLAEFKRAVKVATG |
| | | | | QELSNNILDTVFKIFDLDGDECLSHEEFLGVLKNRMHRGLWVPQ |
| | | | | HQSIQEYWKCVKKESIKGVKEVWKQAGKGLF |
| 746 | A | 7 | 368 | SSTWCPQPTTTPRKPTWSPSC*ALASSSSPGSSWPGSATCASS |
| | | | | SSWTSRGWTRPGSGSSAPNCCSCWPSGPRPSQGTSRRSRLSGTL |
| | | | | RTSWAASPPVT\SIPEEDASAPTGSAPEAGGSA |
| 707 | A | 609 | 785 | LGLEHISSSGEKYYYNCRTEVSQWGKTPKSGLERGQRQKEANKM |
| | | | | AVNSFPKDRDYRREVMQATATSGFASGKSTSGDKPVSHSCTTPS |
| | | | | TSSASGLNPTSAPPTSASAGPCFSVFHSSPIP/TLTSGPKSS*T |
| | | | | IAVLLWKPRCSLIILMWT*SIINEVLTGDVTQASLQTIIHKCLT |
| | | | | AGPSVFKITSLISQAAQLSTQAQASNQSPMSLTSDASSPRIICF |
| | | | | SKE*GTPQT*\PVPIQTFGFSTPPVSSQPKVSTPVVKQGPVSQS |
| | | | | ATQQPVTADKQQGHEPVSPRSLQRSSSQRSPSPGPNHTSNSSNA |
| | | | | SNATVVPQNSSARSTCSLTP/VTSSTLQ*KSTTTIVEQKFHNGE |
| | | | | KPQRVAWKEDRDKKKQTRWQSTASQKIGITEER |
| 747 | A | 224 | 435 | RGWALDWIGADLSLHLQEEVETEVAWEECGHVLLSLCYSSQQGG |
| | | | | LLVGVLRCAHLAPMDANGYSDPFVRL |
| 748 | A | 1 | 1760 | MVHNQYGTCCLSSGMRECGHTYTSWPPRSLSLESSQIATNSIAQ |
| | | | | GHQGRGAPQQLVVSRLSEGFITKAANNSAQVIEDMKDTNARCCL |
| | | | | LMPHIFTPKSHPNQPTWENGATLRSHGEIYISARNPGIQVESST |
| | | | | WELGVASLEEGINAFHIKNIYVKEDVNGSWVVQEHYHSSKDVES |
| | | | | TQVPIHGGLDKENVVPMHDGILRSCKNRMKSCPLFFAATWMQQK |
| | | | | AIILSKLMQKRKTKYHMFFITPDQSSQRTSFEVNGHCTSLRGGS |
| | | | | KYRSGSVKTLRTIYNFSYHTRSVGRYPSSSAEDWGMKREKSALL |
| | | | | ITDDTISNEAALVDDGYIIGEMLPPCGRCEKKSREQIVIPFFSL |
| | | | | LIKDIYFLNEGCANRLPNGHVNFEKFWELAKQVSEFMTWKQVEC |
| | | | | PFERDRKILQYLLTVPVFSEDVSGLPVCWRMSVCPSASVLPSVS |
| | | | | SRRPAAPQTAPAKLRLIPPVCPACWHLSVCPAGVPFYQCAPLNV |
| | | | | LSTTRHLRLLQQMCSSPRPATCVSVCRRSRVFIGPRWGRDHGGA |
| | | | | GLCFLASRTTNTHEDPAVIGAPGSAKHTSSLKTRWRTYFLQLTD |
| | | | | RLRFCETEMFTEDT |
| 749 | A | 2 | 2331 | AATHPQMVGPEDAGACSGRNPKLLPVPAPDPVGQDRKVTRATGG |
| | | | | FGGGVGAVEPPEEADEEEETPPRQLLQRYLAAAGEQLEPGLCYC |
| | | | | PLPAGQAGAPPPSAAPRSDACLLGSGSKHRGAEVADGRAPRHEG |
| | | | | MTNGDSGFLPGRDCRDLEEARGLARAGGRESRRRRPYGRLRLEG |
| | | | | PGDEDADGAGSPSDWASPLEDPLRSCCLVAADAQEPEGAGSDSG |
| | | | | DSPASSCSSSEDSEQRGVGAGGPEEGAPPATSAERTNGGAEPRL |
| | | | | GFSDIHFNSRNTFQVSRGQSARDHLPPAGPPVPLPAAEQGPAGA |
| | | | | SARARRSGGFADFFTRNLFPKRTK\DLKSVVHSAPGWKLFGKVP |
| | | | | PRENLQKTSKIIQQEYEARTGRTCKPPPQSSRRKNFEFEPLSTT |
| | | | | ALILEDRPSNLPAKSVEEALRHRQEYDEMVAEAKKREIKEAHKR |
| | | | | KRIMKERFKQEENIASAMVIWINEILPNWEVMRSTRRVRELWWQ |
| | | | | GLPPSVRGKVWSLAVGNELNITPELYEIFLSRAKERWKSFSETS |
| | | | | SENDTEGVSVADREASLELIKLDISRTFPSLYIFQKGGPYHDVL |
| | | | | HSILGAYTCYRPDVGYVQGMSFIAAVLILNLEEADAFIAFANLL |
| | | | | NKPCQLAFFRVDHSMMLKYFATFEVFFEENLSKLFLHFKSYSLT |
| | | | | PDIYLIDWIFTLYSKSLPLDLACRVWDVFCRDGEEFLFRTGLGI |
| | | | | LRLYEDILLQMDFIHIAQFLTKLPEDITSEKLFSCIAAIQMQNS |
| | | | | TKKWTQVFASVMKDIKEGDKNSSPALKS |
| 750 | C | 41 | 318 | MSSMNPEYDYLFKLLLRFADDTYTESYISTIGVDFKIRTIELDG |
| | | | | KTIKLQIWDTAGQXRFRTITSSYYRGAHGIIVVYDVTDQGSFNN |
| | | | | VKQW |
| 751 | A | 3 | 522 | RAAWHEGKFGAVCTCMEKATGLKLSAKVIKKQTPKDKEMVLLEI |
| 707 | A | 609 | 785 | LGLEHISSSGEKYYYNCRTEVSQWGKTPKSGLERGQRQKEANKM |
| | | | | AVNSFPKDRDYRREVMQATATSGFASGKSTSGDKPVSHSCTTPS |
| | | | | TSSASGLNPTSAPPTSASAGPCFSVFHSSPIP/TLTSGPKSS*T |
| | | | | IAVLLWKPRCSLIILMWT*SIINEVLTGDVTQASLQTIIHKCLT |
| | | | | AGPSVFKITSLISQAAQLSTQAQASNQSPMSLTSDASSPRIICF |
| | | | | SKE*GTPQT*\PVPIQTFGFSTPPVSSQPKVSTPVVKQGPVSQS |
| | | | | ATQQPVTADKQQGHEPVSPRSLQRSSSQRSPSPGPNHTSNSSNA |
| | | | | SNATVVPQNSSARSTCSLTP/VTSSTLQ*KSTTTIVEQKFHNGE |
| | | | | KPQRVAWKEDRDKKKQTRWQSTASQKIGITEER |
| | | | | EVMNQLNHRNLIQLYAAIETPHEIVLFMEYIEGGELFERIVDED |
| | | | | YHLTEVDTMVFVRQICDGILFMHKMRVLHLDLKPENILCVNTTG |
| | | | | HLVKIIDFGLARRYNPNEKLKVNFGTPEFLSPEVVNYDQIF |
| 752 | A | 183 | 473 | EKLASVSNLVTVFENSRTPEAAPRGHRLEDVHHRPECRPPESPG |
| | | | | PREKTNVGEAVGSEPRTVSRRYLNSLKNKLSSEAWRKSCQPVTL |
| | | | | SRSXTHVPE |
| 753 | A | 15 | 416 | ASVLGKETGFSLSELPRESSYDIYRVPSSQSMEDRGYSPDTRVV |
| | | | | RFLKGKSIGLRLAGGNDVGIFVSGVQAGSPADGQGIQEGDQILQ |
| | | | | VNDVPFQNLTREEAVQFLLGLPPGEEMELVTQRKQDIFWKMVQS |
| | | | | RV |
| 754 | A | 2 | 2180 | KLLGSRGPRLLPPECRSVACVQALKGSKKLVLSVYSAGRIPGGY |
| | | | | VTNHIYTWVDPQGRSISPPSGLPQPHGGALRQQEGDRRSTLHLL |
| | | | | QGGDEKKVNLVLGDGRSLGLTIRGGAEYGLGIYITGVDPGSEAE |
| | | | | GSGLKVGDQILEVNGRSFLNILHDEAVRLLKSSRHLILTVKDVG |
| | | | | RLPHARTTVDETKWIASSRIRETMANSAGFLGDLTTEGINKPGF |
| | | | | YKGPAGSQVTLSSLGNQTRVLLEEQARHLLNEQEHATMAYYLDE |
| | | | | YRGGSVSVEALVMALFKLLNTHAKFSLLSEVRGTISPQDLERFD |
| | | | | HLVLRREIESMK\ARQPPGPGAGEHLVPWCSYS*HGFHSTGSHG |
| | | | | TSTTVSSARNTLDLEETGEAVQGNINALPDVSVDDVRSTSQGLS |
| | | | | SFKPLPRPPPLAQGNDLPLGQPRKLGREDLQPPSSMPSCSGTVF |
| | | | | SAPQNRSPPAGTAPTPGTSSAQDLPSSPIYASVSPANPSSKRPL |
| | | | | DAHLALVNQHPIGPFPRVQSPPHLKSPSAKATVAGGCLLPPSPS |
| | | | | GHPDQTGTNQHFVMGEVHRPDSEPDVNEVRALPQTRTASTLSQL |
| | | | | SDSGQTLSEDSGVDAGEAEASAPGRGRQSASTKSRSSKELPRKE |
| | | | | RPTDGANKPPGLLEPTSTLVRVKKSAATLGIAIEGGANTRQPLP |
| | | | | RIVTIQRGGSAHNCGQLKVGHVILEVNGLTLRGKEHREAARIIA |
| | | | | EAFKTKDRDYIDFLVTEFNVML |
| 755 | A | 1812 | 1402 | PAAGPALWRLPEELLLLICSYLDMRALGRLAQVCHWLRRFTSCD |
| | | | | LLWRRIARASLNSGFTRLGTDLMTSVPVKERVKVSQNWRLGRCR |
| | | | | EGILLKWRCSQMPWMQLEDDSLYISQANFILAYQFRPDGASLNR |
| | | | | RPLGV |
| 756 | A | 1812 | 1402 | PAAGPALWRLPEELLLLICSYLDMRALGRLAQVCHWLRRFTSCD |
| | | | | LLWRRIARASLNSGFTRLGTDLMTSVPVKERVKVSQNWRLGRCR |
| | | | | EGILLKWRCSQMPWMQLEDDSLYISQANFILAYQFRPDGASLNR |
| | | | | RPLGV |
| 757 | A | 1 | 375 | VLNPRKKCKKKKYVNSGTVTLLSFSVDSEFTFVDYIKGGTQLNF |
| | | | | TVAIDFTASNGETRMSEKVGGNPLQPTSLHYMSPYQLSAYAMAL |
| | | | | KAVGEIIQDYDSDKLFPAYGFGAKLPPEGRISHQFPL |
| 707 | A | 609 | 785 | LGLEHISSSGEKYYYNCRTEVSQWGKTPKSGLERGQRQKEANKM |
| | | | | AVNSFPKDRDYRREVMQATATSGFASGKSTSGDKPVSHSCTTPS |
| | | | | TSSASGLNPTSAPPTSASAGPCFSVFHSSPIP/TLTSGPKSS*T |
| | | | | IAVLLWKPRCSLIILMWT*SIINEVLTGDVTQASLQTIIHKCLT |
| | | | | AGPSVFKITSLISQAAQLSTQAQASNQSPMSLTSDASSPRIICF |
| | | | | SKE*GTPQT*\PVPIQTFGFSTPPVSSQPKVSTPVVKQGPVSQS |
| | | | | ATQQPVTADKQQGHEPVSPRSLQRSSSQRSPSPGPNHTSNSSNA |
| | | | | SNATVVPQNSSARSTCSLTP/VTSSTLQ*KSTTTIVEQKFHNGE |
| | | | | KPQRVAWKEDRDKKKQTRWQSTASQKIGITEER |
| 758 | A | 5 | 658 | QSMEENQDLKKELLKCKQEARNLQGIKDALQQRLTQQDTSVLQL |
| | | | | KQELLRANMDKDELHNQNVDLQRKLDERNRLLGEYKKELGQKDR |
| | | | | LLQQHQAKLEEALRKLSDVSYHQVDLERELEHKDVLLAHCMKRE |
| | | | | ADEATNYNSHNSQSNGFLLPTAGKGATSVSNRGTSDLQLVRDAL |
| | | | | RSLRNSFSGHDPQHHTIDSLEQGISSLMERLHVMETXKKKKK |
| 759 | A | 1319 | 2694 | LARPAQPVLLREPEGAGPPVPAGHLVHHLQGGHLRERAHPDLEA |
| | | | | HEHPLPCDQMFWRQMGGHLRMVEANSRGVVWGIGYDHTAWVYTG |
| | | | | GYGGGCFQGLASSTSNIYTQSDVKCVHIYENQRWNPVTGYTSRG |
| | | | | LPTDRYMWSDASGLQECTKAGTKPPSLQWAWVSDWFVDFSVPGG |
| | | | | TDQEGWQYASDFPASYHGSKTMKDFVRRRCWARKCKLVTSGPWL |
| | | | | EVPPIALRDVSIIPESPGAEGSGHSIALWAVSDKGDVLCRLGVS |
| | | | | ELNPAGSSWLHVGTDQPFASISIGACYQVWAVARDGSAFYRGSV |
| | | | | YPSQPAGDCWYHIPSPPRQRLKQVSAGQTSVYALDENGNLWYRQ |
| | | | | GITPSYPQGSSWEHVSNNVCRVSVGPLDQVWVIANKVQGSHSLS |
| | | | | RGTVCHRTGVQPHEPKGHGWDYGIGGGWDHISVRANATRAPRSS |
| | | | | SQEQEPSAPPEAHGPVCC |
| 760 | A | 3 | 1015 | SSRPVRPRPAARLSAMSSTQFNKGPSYGL\SAQ\VKNRLL\SKY |
| | | | | DPQKE\AELRTW\IEGLTGLSIGPDFQKG\LKDG\TIL\CTLMN |
| | | | | KLQPG\SVPKINRSMQN\WHQLENLSNFIK\AMVSYGMNP\VDL |
| | | | | FEANDLF\ESGNMT\QVQVSLLALGGKRPKTKGAAEGGLDIGVK |
| | | | | YSEKQERNFDDATMKAGQCVIG\LQMGT\NKCASQSGMTAYGTR |
| | | | | RHLYDPKNHILPPMDHSTISLQMGT\NKCASQVG\MTA\PGTRR |
| | | | | HIYEYQAGNPTSCDNFSM\SLQ\MGYTQGAQTQSGQVF\GPGRP |
| | | | | DI*TPSTCPQGTI\ADGAPSGTGDCPDPGEVPEYPPYYQEEAGY |
| 761 | A | 3 | 674 | SLVGSGVYGLGAGEVCAAATSAAIPSRAPAPRTRGRAGLPTEPR |
| | | | | GPAAVVSRPPAWKSV*ASKMSSIKHLVYAVIRFLREQSQMDTYT |
| | | | | SDEQESLEVAIQCLETVFKISPEDTHLAVSQPLTEMFTSSFCKN |
| | | | | DVLPLSNSVPEDVGKADQLKDEGNNHMKEENYAAAVDCYTQAIE |
| | | | | LDPNNAVYYCNRAAAQSKLRHYTDAIKDCEKAIAIDSQYSKAYG |
| | | | | RMGL |
| 762 | A | 2 | 854 | RPPAARARRWLPKPSPARRSRRPAHRCSRRRRTCTPQATRPGMR* |
| | | | | APAAACGPTGRRS/RLPALKLALEYIVPCMNKHGICVVDDFLG |
| | | | | KETGQQIGDEVRALHDTGKFTDGQLVSQKSDSSKDIRGDKITWI |
| | | | | EGKEPGCETIGLLMSSMDDLIRHCNGKLGSYKINGRTKAMVACY |
| | | | | PGNGTGYVRHVDNPNGDGRCVTCIYYLNKDWDAKVSGGILRIFP |
| | | | | EGKAQFADIEPKFDRLLFFWSDRRNPHEVQPAYATRYAITVWYF |
| | | | | DADERARAKVKY/RNR*KRCEG |
| 763 | A | 1813 | 986 | MPALRPALLWALLALWLCCATPAHALQCRDGYEPCVNEGMCVTY |
| 707 | A | 609 | 785 | LGLEHISSSGEKYYYNCRTEVSQWGKTPKSGLERGQRQKEANKM |
| | | | | AVNSFPKDRDYRREVMQATATSGFASGKSTSGDKPVSHSCTTPS |
| | | | | TSSASGLNPTSAPPTSASAGPCFSVFHSSPIP/TLTSGPKSS*T |
| | | | | IAVLLWKPRCSLIILMWT*SIINEVLTGDVTQASLQTIIHKCLT |
| | | | | AGPSVFKITSLISQAAQLSTQAQASNQSPMSLTSDASSPRIICF |
| | | | | SKE*GTPQT*\PVPIQTFGFSTPPVSSQPKVSTPVVKQGPVSQS |
| | | | | ATQQPVTADKQQGHEPVSPRSLQRSSSQRSPSPGPNHTSNSSNA |
| | | | | SNATVVPQNSSARSTCSLTP/VTSSTLQ*KSTTTIVEQKFHNGE |
| | | | | KPQRVAWKEDRDKKKQTRWQSTASQKIGITEER |
| | | | | HNGTGYCKCPEGFLGEYCQHRDPCEKNRCQNGGTCVAQAMLGKA |
| | | | | TCRCASGFTGEDCQYSTSHPCFVSRPCLNGGTCHMLSRDTYECT |
| | | | | CQVGFTGKECQWTDACLSHPCANGSTCTTVANQFSCKCLTGFTG |
| | | | | QKCETDVNECDIPGHCQHGGICLNLPGSYQCQCLQGFTGQYCDS |
| | | | | LYVPCAPSPCVNGGTCRQTGDFTFECNCLPETVRRGTELWERDR |
| | | | | EVWNGKEHDEN* |
| 764 | A | 3 | 1505 | IPGSTISSPLQGRPAELLGRCQRPCHRHVADMVISESMDILFRI |
| | | | | RGGLDLAFQLATPNEIFLKKALKHVLSDLSTKLSSNALVFRICH |
| | | | | SSVYIWPSSDINTIPGELTDASACKNILRFIQFEPEEDIKRKFM |
| | | | | RKKDKKLSDMHQIVNIDLMLEMSTSLAAVTPIIERESGGHHYVN |
| | | | | MTLPVDAVISVAPEETWGKVRKLLVDAIHNQLTDMEKCILKYMK |
| | | | | GTSIVVPEPLHFLLPGKKNLVTISYPSGIPDGQLQAYRKELHDL |
| | | | | FNLPHDRPYFKRSNAYHFPDEPYKDGYIRNPHTYLNPPNMETGM |
| | | | | IYVVQGIYGYHHYMQDRIDDNGWGCAYRSLQTICSWFKHQGYTE |
| | | | | RSIPTHREIQQALVDAGDKPATFVGSRQWIGSIEVQLVLNQLIG |
| | | | | ITSKILFVSQGSEIASQGRELANHFQSEGTPVMIGGGVLAHTIL |
| | | | | GVAWNEITGQIKFLILDPHYTGAEDLQVILEKGWCGWKGPDFWN |
| | | | | KDAYYNLCLPQRPNMI |
| 765 | A | 1391 | 730 | RTRGINTSSRLLNLRQVSKTRLSEPGTDLVEPSPKHTPNTSDNE |
| | | | | GSDTEVCGPNSPSKRGNSTGIKLVRKEGGLDDSVFIAVKEIGRD |
| | | | | LYRGLPTEERIQKLEFMLDKLQNEIDQELEHNNSLVREEKETTD |
| | | | | TRKKSLLSAALAKSGERLQALTLLMIHYRAGIEDIETLESLSLD |
| | | | | QHSKKISKYTDDTEEDLDNEISQLIDSQPFSSISDDLFGPSESV |
| 766 | A | 276 | 1421 | GSHQKQMLVPCFLYSLQNRKPSLYGSLTCQGIGLDGIPEVTASE |
| | | | | GFTVNEINKKSIHISCPKENASSKFLAPYTTFSRIHTKSITCLD |
| | | | | ISSRGGLGVSSSTDGTMKIWQASNGELRRVLEGHVFDVNCCRFF |
| | | | | PSGLVVLSGGMDAQLKIWSAEDASCVVTFKGHKGGILDTAIVDR |
| | | | | GRNVVSASRDGTARLWDCGRSACLGVLADCGSSINGVAVGAADN |
| | | | | SINLGSPEQMPSEREVGTEAKMLLLAREDKKLQCLGLQSRQLVF |
| | | | | LFIGSDAFNCCTFLSGFLLLAGTQDGNIYQLDVRSPRAPVQVIH |
| | | | | RSGAPVLSLLSVRDGFIASQGDGSCFIVQQDLDYVTELTGADCD |
| | | | | PVYKVATWEKQIYTCCRDGLVRRYQLSDL |
| 767 | A | 528 | 971 | HPLGSGSAPGNHYLLTLVSSCPSVAPVLEGAGDRHSHLSGLELL |
| | | | | LCPHALVDTVPAPPSALHGDTHAHTHTHVHTHCPIAQETCRGPP |
| | | | | LGASRLSPQGPGHLTLAPQEGSYLDFWDTHRGDPKPRRRRKSL\ |
| | | | | KTFSLTPATFRGIWAL |
| 768 | A | 1802 | 1413 | PEKATVVNQDGQPLIE*KLKEKQVRWKFIKRWKTRYFTLAGNQL |
| | | | | LFQKGKSKDDPDDCPIELIKVQSVKAVAKKRRDRSLPRAFEIFT |
| 707 | A | 609 | 785 | LGLEHISSSGEKYYYNCRTEVSQWGKTPKSGLERGQRQKEANKM |
| | | | | AVNSFPKDRDYRREVMQATATSGFASGKSTSGDKPVSHSCTTPS |
| | | | | TSSASGLNPTSAPPTSASAGPCFSVFHSSPIP/TLTSGPKSS*T |
| | | | | IAVLLWKPRCSLIILMWT*SIINEVLTGDVTQASLQTIIHKCLT |
| | | | | AGPSVFKITSLISQAAQLSTQAQASNQSPMSLTSDASSPRIICF |
| | | | | SKE*GTPQT*\PVPIQTFGFSTPPVSSQPKVSTPVVKQGPVSQS |
| | | | | ATQQPVTADKQQGHEPVSPRSLQRSSSQRSPSPGPNHTSNSSNA |
| | | | | SNATVVPQNSSARSTCSLTP/VTSSTLQ*KSTTTIVEQKFHNGE |
| | | | | KPQRVAWKEDRDKKKQTRWQSTASQKIGITEER |
| | | | | DNKTYVFKAKDEKNAEEWLQCINVAVAQAKERESREVTTYL |
| 769 | A | 1674 | 479 | RSPSRDHHGDPSAGPRLREVESRGTTFLLLSFPSSVGKGLSPAS |
| | | | | ASKMKNYKAIGKIGEGTFSEVMKMQSLRDGNYYACKQMKQRFES |
| | | | | DRKSGSLALICELMDMNIYELIRGRRYPLSEKKIMHYMYQLCKS |
| | | | | LDHIHRNGIFHRDVKPENILIKDVLKLGDFGSCRSVYSKQPYTE |
| | | | | YISTRWYRAPECLLTDGFYTYKMDLWSAGCVFYEIASLQPLFPG |
| | | | | VNELDQISKIHDVIGTPAQKILTKFKQSRAMNFDFPFKKGSGIP |
| | | | | LLTTNLSPQCLSLLHAMVGYD\PDERIAAHQALQHPYFQEQ/QK |
| | | | | QSLKQEEDRPKRRGPAYVMEL\PKLKLSG\VVRLSSYSSPTL\Q |
| | | | | SVLGSGTNGRVRLLRP*KCIPASKKTDPRK\DLKPAPQQCRLPT |
| | | | | IVRKGGR |
| 770 | A | 3 | 1795 | LGLGSGTLLSVSEYKKKYREHVLQLHARVKERNARSVKITKRFT |
| | | | | KLLIAPESAAPEEALGPAEEPEPGRARRSDTHTFNRLFRRDEEG |
| | | | | RRPLTVVLQGPAGIGKTMAAKKILYDWAAGKLYQGQVDFAFFMP |
| | | | | CGELLERPGTRSLADLILDQCPDRGAPVPQMLAQPQRLLFILDG |
| | | | | ADELPALGGPEAAPCTDPFEAASGARVLGGLLSKALLPTALLLV |
| | | | | TTRAAAPGRLQGRLCSPQCAEVRGFSDKDKKKYFYKFFRDERRA |
| | | | | ERAYRFVKENETLFALCFVPFVCWIVCTVLRQQLELGRDLSRTS |
| | | | | KTTTSVYLLFITSVLSSAPVADGPRLQGDLRNLCRLAREGVLGR |
| | | | | RAQFAEKELEQLELRGSKVQTLFLSKKELPGVLETEVTYQFIDQ |
| | | | | SFQEFLAALSYLLEDGGVPRTAAGGVGTLLRGDAQPHSHLVLTT |
| | | | | RFLFGLLSAERMRDIERHFGCMVSERVKQEALRWVQGQGQGCPG |
| | | | | VAPEVTEGAKGLEDTEEPEEEEEGEEPNYPLELLYCLYETQEDA |
| | | | | FVRQALCRFPELALQRVRFCRMDVAVLSYCVRCCPAGQALRLIS |
| | | | | CRLVAAQEKKKKSLGKRLQASLGGG |
| 771 | A | 2 | 464 | EDREDHVPKLEQINSTRILSSQNFTLTKKELLSTELLLLEAFSW |
| | | | | NLCLPTPAHFLDYYLLASVSQKDHHCHTWPTTCPRKTKECLKEY |
| | | | | AHYFLEVTLQDHIFYKFQPSVVAAACVGASRICLQLSPYWTRDL |
| | | | | QRISSYSLEHLSTCIEILLVVY |
| 772 | A | 101 | 857 | GQCPGCIQFTKLSSGRCMELEMCIITEENREDLVQRGDECGRAT |
| | | | | ASLVFHIYIWYMYFLYIYLYILHPGIPVICTISQGDMGASKARQ |
| | | | | ERVRQGRGSDGAGWGLAHRSCRSFSDCKRAPGS/GRRQV/PGSK |
| | | | | ASPPAPRPACDPPPSPQTSSSSGPASCRSSCAACRTAPPPRCPA |
| | | | | AAPARAEAPTAGTAARAWPRRCGYA*WGRPPVADVPAAAGRVSR |
| | | | | GTARAAAAGPPAGSLSPAAGRAPRTGWVGAAARR |
| 773 | A | 3139 | 3792 | DFAAKKRRENLRAGEILTLDLASEGSPHARQASEIRQHVLNTTR |
| | | | | LVNNLLDMARIQSGGFNLKKEWLTLEEVVGSALQMLEPGLSSPI |
| | | | | NLSLPEPLTLIHVDGPLFERVLINLLENAVKYAGAQAEIGIDAH |
| 707 | A | 609 | 785 | LGLEHISSSGEKYYYNCRTEVSQWGKTPKSGLERGQRQKEANKM |
| | | | | AVNSFPKDRDYRREVMQATATSGFASGKSTSGDKPVSHSCTTPS |
| | | | | TSSASGLNPTSAPPTSASAGPCFSVFHSSPIP/TLTSGPKSS*T |
| | | | | IAVLLWKPRCSLIILMWT*SIINEVLTGDVTQASLQTIIHKCLT |
| | | | | AGPSVFKITSLISQAAQLSTQAQASNQSPMSLTSDASSPRIICF |
| | | | | SKE*GTPQT*\PVPIQTFGFSTPPVSSQPKVSTPVVKQGPVSQS |
| | | | | ATQQPVTADKQQGHEPVSPRSLQRSSSQRSPSPGPNHTSNSSNA |
| | | | | SNATVVPQNSSARSTCSLTP/VTSSTLQ*KSTTTIVEQKFHNGE |
| | | | | KPQRVAWKEDRDKKKQTRWQSTASQKIGITEER |
| | | | | VEGENLQLDVWDNGPGLPPGQEQTIFDKFARGNKESAVPGVGLG |
| | | | | LAICRAIVDVHGGTITASTDRKVVPVFVLHFPQQMALNLKIS |
| 774 | A | 915 | 435 | LRQYSVKMRIVPTILLNFGADPDLRDIRYNTVLHYAVCGQSL\S |
| | | | | LVEKL\LEYEADLEAKNKDGYTPLLVARY*QLIPKLVKFLLE\K |
| | | | | GADVNASDNYQRTALILAVSGEPPCLVKLLLQQGGEICNEG\MV |
| | | | | DSQLRNMFISMVLLHRYPQFTASHGK\QKHAK |
| 775 | A | 1554 | 233 | EFLGSGVSPDLANEDGLTALHQCCIDDFREMVQQLLEAGANINA |
| | | | | CDSECWTPLHAAATCGHLHLVELLIASGANLLAVNTDGNMPYDL |
| | | | | CDDEQTLDCLETAMADRGITQDSIEAARAVPELRMLDDIRSRLQ |
| | | | | AGADLHAPLDHGATLLHVAAANGFSEAAALLLEHRASLSAKDQD |
| | | | | GWEPLHAAAYWGQVPLVELLVAHGADLNAKSLMDETPLDVCGDE |
| | | | | EVRAKLLELKHKHDALLRAQSRQRSLLRRRTSSAGSRGKVVRRV |
| | | | | SLTQRTDLYRKQHAQEAIVWQQPPPTSPEPPEDNDDRQTGAELR |
| | | | | PPPPEEDNPEVVRPHNGRVGGSPVRHLYSKRLDRSVSYQLSPLD |
| | | | | STTPHTLVHDKAHHTLADLKRQRAAAKLQRPPPEGPESPETAEP |
| | | | | GLPGDTVTPQPDCGFRAGGDPPLLKLTAPAVEAPVERRPCCLLM |
| 776 | A | 710 | 169 | PLSPCQGPLSVFSAKNRWRLVGPVHLTRGEGGFGLTLRGDSPVL |
| | | | | IAAVIPGSQAAAAGLKEGDYIVSVNGQPCRWWRHAEVVTELKAA |
| | | | | GEAGASLQVVSLLPSSRLPSLGDRRPVLLGPRGLLRSQREHGCK |
| | | | | TPASTWASPRPLLNWSRKAQQGKTGGCPQPCAPVKPAPPSSLKH |
| | | | | PGWP |
| 777 | A | 3 | 1049 | TRDELDQFLDKMDDPDYWRTVQDPMTGRDLRLTDEQVALVRRLQ |
| | | | | SGQFGDVGFNPYEPAVDFFSGDVMIHPVTNRPADKRSFIPSLVE |
| | | | | KEKVSRMVHAIKMGWIQPRRPRDPTPSFYDLWAQEDPNAVLGRH |
| | | | | KMHVPAPKLALPGHAESYNPPPEYLLSEEERLAWEQQEPGERKL |
| | | | | SFLPRKFPSLRAVPAYGRFIQERFERCLDLYLCPRQRKMRVNVD |
| | | | | PEDLIPKLPRPRDLQPFPTCQALVYRGHSDLVRCLSVSPGGQWL |
| | | | | VSGSDDGSLRLWEVATARCVRTVPVGGVVKSVAWNPNPAVCLVA |
| | | | | AAVEDSVLLLNPTLGDRLVAGSTDQLLSAFVPPEEPPLQPA |
| 778 | A | 208 | 784 | THLWPHQRPFLFAFLRWQDCKFTCHPECRSLIQLDCSQQEGLSR |
| | | | | DRPSPESTLTVTFSQNVCKPVEETQRPPTLQEIKQKIDSYNTRE |
| | | | | KNCLGMKLSEDGTYTGFIKVHLKLRRPVTVPAGIRPQSIYDAIK |
| | | | | EVNLAATTDKRTSFYLPLDAIKQLHISSTTTVSEVIQGLLKKFM |
| | | | | VVDNPQKFALFKRIHK |
| 779 | A | 3 | 845 | IRVIGESDIMQEFLSESDENYNGVSDVELRVALPDGTTVTVRVK |
| | | | | KNSTTDQVYQAIAAKVGMDSTTVNYFALFEVISHSFVRKLAPNE |
| | | | | FPHKLYIQNYTSAVPGTCLTIRKWLFTTEEEILLNDNDLAVTYF |
| | | | | FHQAVDDVKKGYIKAEEKSYQLQKLYEQRKMVMYLNMLRTCEGY |
| 707 | A | 609 | 785 | LGLEHISSSGEKYYYNCRTEVSQWGKTPKSGLERGQRQKEANKM |
| | | | | AVNSFPKDRDYRREVMQATATSGFASGKSTSGDKPVSHSCTTPS |
| | | | | TSSASGLNPTSAPPTSASAGPCFSVFHSSPIP/TLTSGPKSS*T |
| | | | | IAVLLWKPRCSLIILMWT*SIINEVLTGDVTQASLQTIIHKCLT |
| | | | | AGPSVFKITSLISQAAQLSTQAQASNQSPMSLTSDASSPRIICF |
| | | | | SKE*GTPQT*\PVPIQTFGFSTPPVSSQPKVSTPVVKQGPVSQS |
| | | | | ATQQPVTADKQQGHEPVSPRSLQRSSSQRSPSPGPNHTSNSSNA |
| | | | | SNATVVPQNSSARSTCSLTP/VTSSTLQ*KSTTTIVEQKFHNGE |
| | | | | KPQRVAWKEDRDKKKQTRWQSTASQKIGITEER |
| | | | | NEIIFPHCACDSRRKGHVITAISITHFKLHACTEEGQLENQVIA |
| | | | | FEWDEMQRWDTDEEGMAFCFEYARGEKKPRWVKIFTPYFNYMHE |
| | | | | CFERVFCELKWRKEEY |
| 780 | A | 3 | 1197 | VLSDLCLFYYRDEKEEGILGSILLPSFQIALLTSEDHINRKYAF |
| | | | | KAAHPNMRTYYFCTDTGKEMELWMKAMLDAALVQTEPVKRVDKI |
| | | | | TSENAPTKETNNIPNHRVLIKPEIQNNQKTKEMSKIEEKKALEA |
| | | | | EKYGFQKDGQDRPLTKINSVKLNSLPSEYESGSACPAQTVHYRP |
| | | | | INLSSSENKIVNVSLADLRGGNRPNTGPLYTEADRVIQRTNSMQ |
| | | | | QLEQWIKIQKGRGHEEETRGVISYQTLPRNMPSHRAQIMARYPE |
| | | | | GYRTLPRNSKTRPESICSVTPSTHDKTLGPGAEEKRRSMRDDTM |
| | | | | WQLYEWQQRQFYNKQSTLPRHSTLSSPKTMVNISDQTMHSIPTS |
| | | | | PSHGSIAAYQGYSPQRTYRSEVSSPIQRGDVTIDRRHRAHHPKVK |
| 781 | A | 1 | 542 | SGSSHASDGSGFQELRICSEDQTPLIAGMCSLPMARYYIIKYAD |
| | | | | QKALYTRDGQLLVGDPVADNCCAEKICTLPNRGLDRTKVPIFLG |
| | | | | IQGGSRCLACVETEEGPSLQLEDVNIEELYKGGEEATRFTFFQS |
| | | | | SSGSAFRLEAAAWPGWFLCGPAEPQQPVQLTKESEPSARTKFYF |
| | | | | EQSW |
| 782 | A | 1140 | 467 | VNSATEDRRSIRGLDSTPPQSRRCCAMPGVGNSGPSTFSSETAH |
| | | | | PCSRKKVHFGSIHDAVRAGDVKQLSEIVVRGASINELDVLHKFT |
| | | | | PLHWAAHSGSLECLHWLLWHGADITHVTTRGWTASHIAAIRGQD |
| | | | | ACVQALIMNGANLTAQDDRGCTPLHLAATHGHSFTLQIMLRSGV |
| | | | | DPSVTDKREWRPVHYAAFHGRLGCLQLLVKWGCSIEDVDYNGNL |
| | | | | PEPP |
| 783 | A | 2 | 770 | PLELEQTIRFR\KKVEKDENYVNAIMQLGSIMEHCIKQNNAIDI |
| | | | | YEEYFNDEEAMEVMEEDPSAKTINVFRDPQEIKRAATHLSWHPD |
| | | | | GNRKLAGAYSCLDFQRAPVGMSSDSYIWDLENPNKPELALKPSS |
| | | | | PLVTLEFNPKDSHVLLGGCYNGQIACWDTRKGSLVAELSTIESS |
| | | | | HRDPVYGTIWLQSKTGTECFSASTDGQVMWWDIRKMSEPTEVVI |
| | | | | LDITKKEQLENALGAISLEFESTLVSVPCCPFPDLH |
| 784 | A | 45 | 456 | FKGIRSLEIKGFMHHWSYPCAVLQLRQPGSALTPLKLPCQSPGG |
| | | | | LPGAEVTYMNMTAYNKGRLQSSFWIVDKQHVYIGSAGLDWQSLG |
| | | | | QMKELGVIFYNCSCLVLDLQRIFALYSSLKFKSRVPQTWSKRLY |
| | | | | GVYDN |
| 785 | A | 411 | 17 | NKGPGDWRQDGGFPYLTQPWPSPKARLSTLWPQQEVSPGPGDTW |
| | | | | LDKALQPGRPRLSLTQWLCGAGH*LPPCPLPSLPPP\TA*HVNC |
| | | | | VPRTAVVGTGYANWNDSRTKIKLGQEEGASQGALLGPESPSSLL |
| 786 | A | 4 | 549 | EGTAEAFVNSINAPASERTLWARERTQDLAPLEKHSVGENTMVT |
| 707 | A | 609 | 785 | LGLEHISSSGEKYYYNCRTEVSQWGKTPKSGLERGQRQKEANKM |
| | | | | AVNSFPKDRDYRREVMQATATSGFASGKSTSGDKPVSHSCTTPS |
| | | | | TSSASGLNPTSAPPTSASAGPCFSVFHSSPIP/TLTSGPKSS*T |
| | | | | IAVLLWKPRCSLIILMWT*SIINEVLTGDVTQASLQTIIHKCLT |
| | | | | AGPSVFKITSLISQAAQLSTQAQASNQSPMSLTSDASSPRIICF |
| | | | | SKE*GTPQT*\PVPIQTFGFSTPPVSSQPKVSTPVVKQGPVSQS |
| | | | | ATQQPVTADKQQGHEPVSPRSLQRSSSQRSPSPGPNHTSNSSNA |
| | | | | SNATVVPQNSSARSTCSLTP/VTSSTLQ*KSTTTIVEQKFHNGE |
| | | | | KPQRVAWKEDRDKKKQTRWQSTASQKIGITEER |
| | | | | KTHDQPVEEEDRYQGEDPESPFTQSDEGSSETPNSLASEEGNSS |
| | | | | SETGELPVQGDSQSQGDQHGESVQGGHNNNPDTQRQGTPGEKNR |
| | | | | ALEAVVPAVRGEDVQLTEDQEQPARGEHKNQGPRTKGPGAAVEL |
| | | | | NVHSDP |
| 787 | A | 214 | 916 | RLPTGHQFSGVEGLILLQSPKSVAEGRRRLGVQSGFSLPRFDGS |
| | | | | FFWGQVMKVLRHKYLINFYRAIESTSRVYIILELAQGGDVLEWI |
| | | | | QRYGACSEPLAGKWFSQLTLGIAYLHSKSIVHR*GRCHPDWGLC |
| | | | | PQGGFMHISHFLSFFPLS/TLPPQYLAYSCTLF*SYGQGY**ST |
| | | | | HCMQSIL*NTMVSSRWSSDTILCLSPYFGLCSQLHGFPSSLPCA |
| | | | | IIMVSTSHFLCPHLY |
| 788 | A | 214 | 916 | RLPTGHQFSGVEGLILLQSPKSVAEGRRRLGVQSGFSLPRFDGS |
| | | | | FFWGQVMKVLRHKYLINFYRAIESTSRVYIILELAQGGDVLEWI |
| | | | | QRYGACSEPLAGKWFSQLTLGIAYLHSKSIVHR*GRCHPDWGLC |
| | | | | PQGGFMHISHFLSFFPLS/TLPPQYLAYSCTLF*SYGQGY**ST |
| | | | | HCMQSIL*NTMVSSRWSSDTILCLSPYFGLCSQLHGFPSSLPCA |
| | | | | IIMVSTSHFLCPHLY |
| 789 | A | 3 | 379 | YNQKVDLFSLGIIFFEMSYHPMVTASERIFVLNQLRDPTSPKFP |
| | | | | EDFDDGEHAKQKSVISWLLNHDPAKRPTATELLKSELLPPPQME |
| | | | | ESELHEVLHHTLTNVDGKAYRTIDGPRSFRQRISPAI |
| 790 | A | 2 | 4966 | RWPRRARLLRRGRGGGGVESLPHFGAPVPRARLQLTARRGHAGL |
| | | | | RARMREAAAALVPPPAFAVTPAAAMEEPPPPPPPPPPPPEPETE |
| | | | | SEPECCLAARQEGTLGDSACKSPESDLEDFSDETNTENLYGTSP |
| | | | | PSTPRQMKRMSTKHQRNNVGRPASRSNLKEKMNAPNQPPHKDTG |
| | | | | KTVENVEEYSYKQEKKIRAALRTTERDHKKNVQCSFMLDSVGGS |
| | | | | LPKKSIPDVDLNKPYLSLGCSNAKLPVSVPMPIARPARQTSRTD |
| | | | | CPADRLKFFETLRLLLKLTSVSKKKDREQRGQENTSGFWLNRSN |
| | | | | ELIWLELQAWHAGRTINDQDFFLYTARQAIPDIINEILTFKVDY |
| | | | | GSFAFVRDRAGFNGTSVEGQCKATPGTKIVGYSTHHEHLQRQRV |
| | | | | SFEQVKRIMELLEYIEALYPSLQALQKDYEKYAAKDFQDRVQAL |
| | | | | CLWLNITKDLNQKLRIMGTVLGIKNLSDIGWPVFEIPSPRPSKG |
| | | | | NEPEYEGDDTEGELKELESSTDESEEEQISDPRVPEIRQPIDNS |
| | | | | FDIQSRDCISKKLERLESEDDSLGWGAPDWSTEAGFSRHCLTSI |
| | | | | YRPFVDKALKQMGLRKLILRLHKLMDGSLQRARIALVKNDRPVE |
| | | | | FSEFPDPMWGSDYVQLSRTPPSSEEKCSAVSWEELKAMDLPSFE |
| | | | | PAFLVLCRVLLNVIHECLKLRLEQRPAGEPSLLSIKQLVRECKE |
| | | | | VLKGGLLMKQYYQFMLQEVLEDLEKPDCNIDAFEEDLHKMLMVY |
| | | | | FDYMRSWIQMLQQLPQASHSLKNLLEEEWNFTKEITHYIRGGEA |
| | | | | QAGKLFCDIAGMLLKSTGSFLEFGLQESCAEFWTSADDSSASDE |
| 707 | A | 609 | 785 | LGLEHISSSGEKYYYNCRTEVSQWGKTPKSGLERGQRQKEANKM |
| | | | | AVNSFPKDRDYRREVMQATATSGFASGKSTSGDKPVSHSCTTPS |
| | | | | TSSASGLNPTSAPPTSASAGPCFSVFHSSPIP/TLTSGPKSS*T |
| | | | | IAVLLWKPRCSLIILMWT*SIINEVLTGDVTQASLQTIIHKCLT |
| | | | | AGPSVFKITSLISQAAQLSTQAQASNQSPMSLTSDASSPRIICF |
| | | | | SKE*GTPQT*\PVPIQTFGFSTPPVSSQPKVSTPVVKQGPVSQS |
| | | | | ATQQPVTADKQQGHEPVSPRSLQPRSSSQRSPSPGPNHTSNSSNA |
| | | | | SNATVVPQNSSARSTCSLTP/VTSSTLQ*KSTTTIVEQKFHNGE |
| | | | | KPQRVAWKEDRDKKKQTRWQSTASQKIGITEER |
| | | | | IIRSVIEISRALKELFHEARERASKALGFAKMLRKDLEIAAEFR |
| | | | | LSAPVRDLLDVLKSKQYVKVQIPGLENLQMFVPDTLAEEKSIIL |
| | | | | QLLNAAAGKDCSKDSDDVLIDAYLLLTKHGDRARDSEDSWGTWE |
| | | | | AQPVKVVPQVETVDTLRSMQVDNLLLVVMQSAHLTIQRKAFQQS |
| | | | | IEGLMTLCQEQTSSQPVIAKALQQLKNDALELCNRISNAIDRVD |
| | | | | HMFTSEFDAEVDESESVTLQQYYREAMIQGYNFGFEYHKEVVRL |
| | | | | MSGEFRQKIGDKYISFARKWMNYVLTKCESGRGTRPRWATQGFD |
| | | | | FLQAIEPAFISALPEDDFLSLQALMNECIGHVIGKPHSPVTGLY |
| | | | | LAIHRNSPRPMKVPRCHSDPPNPHLIIPTPEGFSTRSMPSDARS |
| | | | | HGSPAAAAAAAAAVAASRPSPSGGDSVLPKSISSAHDTRGSSVP |
| | | | | ENDRLASIAAELQFRSLSRHSSPTEERDEPAYPRGDSSGSTRRS |
| | | | | WELRTLISQSKDTASKLGPIEAIQKSVRLFEEKRYREMRRKNII |
| | | | | GQVCDTPKSYDNVMHVGLRKVTFKWQRGNKIGEGQYGKVYTCIS |
| | | | | VDTGELMAMKEIRFQPNDHKTIKETADELKIFEGIKHPNLVRYF |
| | | | | GVELHREEMYIFMEYCDEGTLEEVSRLGLQEHVIRLYSKQITIA |
| | | | | INVLHEHGIVHRDIKGANIFLTSSGLIKLGDFGCSVKLKNNAQT |
| | | | | MPGEVNSTLGTAAYMAPEVITRAKGEGHGRAADIWSLGCVVIEM |
| | | | | VTGKRPWHEYEHNFQIMYKVGMGHKPPIPERLSPEGKDFLSHCL |
| | | | | ESDPKMRWTASQLLDHSFVKVCTDEE |
| 791 | A | 20 | 432 | SRAAALLEAVTETLFYYEVAEKIWSNRANRQCADCGSSRPDWAA |
| | | | | VNLGVVICKQCAGQHRALGSGISKVQSLKLDTSVWSNEIVQLFI |
| | | | | VLGNDRANRFWAGTLPPGEGLHPDATPGPRGEFISRKYRLGLFR |
| | | | | KPHPQ |
| 792 | A | 1121 | 320 | SSCFQTSSHACFVTEFVPGGDPMMQIHEDVFPEPQARFYVACVV |
| | | | | LGLQFLHEKKIIYRDLKLDNLLLDAQGFLKIADFGLCKEGIGFG |
| | | | | DRTSTFCGTPEFLAPEVLTQEAYTRAVDWWGLGVLLYEMLVGEC |
| | | | | PFPGDTEEEVFDCIRLHGRPPTPAFLSVQG\VKFIQKLLQKCPE |
| | | | | KPLGAGDQNAEEIKVQPFFRPTNWQALLARTIQPPFVPTLCGPA |
| | | | | DLRYFEGEFHRAA\PALTPPAPHSLLTARQQAAFRDFDFVSERF |
| | | | | LEP |
| 793 | A | 2480 | 385 | HLLIAQELADRVGEGRACWSLGNAYVSMGRPAQALTFAKKHLQI |
| | | | | SQEIGDRHGELTARMNVAQLQLVLGRLTSPAASEKPDLAGYEAQ |
| | | | | GARPKRTQRLSAETWDLLRLPLEREQNGDSHHSGDWRGPSRDSL |
| | | | | PLPVRSRKYQEGPDAERRPREGSHSPLDSADVRVHVPRTSIPRA |
| | | | | PSSDEECFFDLLTKFQSSRMDDQRCPLDDGQAGAAEATAAPTLE |
| | | | | DRIAQPSMTASPQTEEFFDLIASSQSRRLDDQRASVGSLPGLRI |
| | | | | THSNAGHLRGHGEPQEPGDDFFNMLIKYQSSRIDDQRCPPPDVL |
| | | | | PRGPTMPDEDFFSLIQRVQAKRMDEQRVDLAGGPGAGGRRPARA |
| 707 | A | 609 | 785 | LGLEHISSSGEKYYYNCRTEVSQWGKTPKSGLERGQRQKEANKM |
| | | | | AVNSFPKDRDYRREVMQATATSGFASGKSTSGDKPVSHSCTTPS |
| | | | | TSSASGLNPTSAPPTSASAGPCFSVFHSSPIP/TLTSGPKSS*T |
| | | | | IAVLLWKPRCSLIILMWT*SIINEVLTGDVTQASLQTIIHKCLT |
| | | | | AGPSVFKITSLISQAAQLSTQAQASNQSPMSLTSDASSPRIICF |
| | | | | SKE*GTPQT*\PVPIQTFGFSTPPVSSQPKVSTPVVKQGPVSQS |
| | | | | ATQQPVTADKQQGHEPVSPRSLQRSSSQRSPSPGPNHTSNSSNA |
| | | | | SNATVVPQNSSARSTCSLTP/VTSSTLQ*KSTTTIVEQKFHNGE |
| | | | | KPQRVAWKEDRDKKKQTRWQSTASQKIGITEER |
| | | | | PAAVPAWCELRPCAHRQAHPAPTPGRRSHSHSHVLPRPLPRTGT |
| | | | | GHAAPRPPRPRATGSGQAARGGRACFHPGLAPMALSFLPSAPAA |
| | | | | GRTGPSACRPRPGAVRLPHPLPQALPVLPCPAKCETLLSPSPSP |
| | | | | KVSLSRLLGPPRTGPCSVPPELVLGWPCDRHAPPLQLRPGAGLP |
| | | | | PSLSPHSPARGQQPQKAPQTTHGRPGCSGSPEVPPAESQGPAGA |
| | | | | STGAGPISKAEGMAGHELRHSKTPSQEKGQGLVLGMLTGSKSSA |
| | | | | QSGWEVAPGSVTLTQVGGWSVEAGEASLSSTLQTPHMRTPLLPP |
| | | | | AGGDDITALSMGRGLTGHQVRDPRTGRTCWSLRWAPGA |
| 794 | A | 543 | 1307 | PSSIPSPELPQKNQRLEKYKDVIGCLPRVTRRTLATLIGHLYRV |
| | | | | QKCAALNQMCTRNLALLFAPSVFQTDGRGEHEVRVLQELIDGYI |
| | | | | SVFDIDSDQVAQIDLEVSLITTWKDVQLSQAGDLIMEVYIEQQL |
| | | | | PDNCVTLKVSPTLTAEELTNQVLEMRGTAAGMDLWVTFEIREHG |
| | | | | ELERPLHPKEKVLEQALQWCQLPEPCSASLLLKKVPLAQAGCLF |
| | | | | TGIRRESPRVGLFAVFVRSHLACWGSRFQERFFLV |
| 795 | A | 3 | 312 | PSECAGIRRLKKTDIPLLQRLLQGPSEKNARIFLMDKDAEEISS |
| | | | | DVAQYINFHFSLLESILQRLNEEEKREIQRIVTKFNKEKAIILK |
| | | | | CLQNKLVIKTETTV |
| 796 | A | 631 | 488 | MHLLCFLDFPLLMQQTFLHHVKRMRPFSSQNFYLAITFHHRLTM |
| | | | | TSR* |
| 797 | A | 1 | 396 | FRGTPVSGLTNRDTLAVIRHFREPIRLKTVKPGKVINKDLRHYL |
| | | | | SLQFQKGSIDHKLQQVIRDNLYLRTIPCTTRAPRDGEVPGVDYN |
| | | | | FISVEQFKALEESGALLESGTYDGNFYGTPKPPAEPSPFQPDPV |
| 798 | A | 1100 | 1741 | RRTFSRASVRRREFLQAISKPCGSATAPRGCPPPWPLSGIS/HT |
| | | | | PNVKVSRLLILGGANVNYRTEVLNNAPILCVQSHLGHEEVVTLL |
| | | | | LEFGACLDGTSENGMTALCYAAAAGHMKLVCLLTKKGVRVDHLD |
| | | | | KKGQCALVHSALRGHGDILQYLLTCEWSPGPPQPGTLRKSHALQ |
| | | | | QALTAAASMGHSSVVQCLLGMEKEHEVEVNGTDTLWGET |
| 799 | A | 1100 | 1741 | RRTFSRASVRRREFLQAISKPCGSATAPRGCPPPWPLSGIS/HT |
| | | | | PNVKVSRLLILGGANVNYRTEVLNNAPILCVQSHLGHEEVVTLL |
| | | | | LEFGACLDGTSENGMTALCYAAAAGHMKLVCLLTKKGVRVDHLD |
| | | | | KKGQCALVHSALRGHGDILQYLLTCEWSPGPPQPGTLRKSHALQ |
| | | | | QALTIAAASMGHSSVVQCLLGMEKEHEVEVNGTDTLWGET |
| 800 | A | 1 | 496 | FRKVECTPSREHLKHQTVYRLLKCAPRGKNGFTPLHMAVDKDTT |
| | | | | NVGRYPVGRFPSLHVVKVLLDCGADPDSRDFDNNTPLHIAAQNN |
| | | | | CPAIMNALIEAGAHMDATNAFKKTAYELLDEKLLARGTMQPFNY |
| | | | | VTLQCLAARALDKNKIPYKGFIPEDLEAFIELH |
| 801 | A | 5405 | 370 | CDRCQEGHFGFNGCGGCRPCACGPAAEGSECHPQSGQCHCRPGT |
| | | | | MGPQCRECAPGYWGLPEQGCRRCQCPGGRCDPHTGRCNCPPGLS |
| 707 | A | 609 | 785 | LGLEHISSSGEKYYYNCRTEVSQWGKTPKSGLERGQRQKEANKM |
| | | | | AVNSFPKDRDYRREVMQATATSGFASGKSTSGDKPVSHSCTTPS |
| | | | | TSSASGLNPTSAPPTSASAGPCFSVFHSSPIP/TLTSGPKSS*T |
| | | | | IAVLLWKPRCSLIILMWT*SIINEVLTGDVTQASLQTIIHKCLT |
| | | | | AGPSVFKITSLISQAAQLSTQAQASNQSPMSLTSDASSPRIICF |
| | | | | SKE*GTPQT*\PVPIQTFGFSTPPVSSQPKVSTPVVKQGPVSQS |
| | | | | ATQQPVTADKQQGHEPVSPRSLQRSSSQRSPSPGPNHTSNSSNA |
| | | | | SNATVVPQNSSARSTCSLTP/VTSSTLQ*KSTTTIVEQKFHNGE |
| | | | | KPQRVAWKEDRDKKKQTRWQSTASQKIGITEER |
| | | | | GERCDTCSQQHQVPVPGGPVGHSIHCEVCDHCVVLLLDDLERAG |
| | | | | ALLPAIHEQLRGINASSMAWARLHRLNASIADLQSQLRSPLGPR |
| | | | | HETAQQLEVLEQQSTSLGQDARRLGGQAVGTRDQASQLLAGTEA |
| | | | | TLGHAKTLLAAIRAVDRTLSELMSQTGHLGLANASAPSGEQLLR |
| | | | | TLAEVERLLWEMRARDLGAPQAAAEAELAAAQRLLARVQEQLSS |
| | | | | LWEENQALATQTRDRLAQHEAGLMDLREALNRAVDATREAQELN |
| | | | | SRNQERLEEALQRKQELSRDNATLQATLHAARDTLASVFRLLHS |
| | | | | LDQAKEELERLAASLDGARTPLLQRMQTFSPAGSKLRLVEAAEA |
| | | | | HAQQLGQLALNLSSIILDVNQDRLTQRAIEASNAYSRILQAVQA |
| | | | | AEDAAGQALQQADHTWATVVRQGLVDRAQQLLANSTALEEAMLQ |
| | | | | EQQRLGLVWAALQGARTQLRDVRAKKDQLEAHIQAAQAMLAMDT |
| | | | | DETSKKIAHAKAVAAEAQDTATRVQSQLQAMQENVERWQGQYEG |
| | | | | LRGQDLGQAVLDAGHSVSTLEKTLPQLLAKLSILENRGVHNASL |
| | | | | ALSASIGRVRELIAQARGAASKVKVPMKFNGRSGVQLRTPRDLA |
| | | | | DLAAYTALKFYLQGPEPEPGQGTEDRFVMYMGSRQATGDYMGVS |
| | | | | LRDKKVHWVYQLGEAGPAVLSIDEDIGEQFAAVSLDRTLQFGHM |
| | | | | SVTVERQMIQETKGDTVAPGAEGLLNLRPDDFVFYVGGYPSTFT |
| | | | | PPPLLRFPGYRGCIEMDTLNEEVVSLYNFERTFQLDTAVDRPCA |
| | | | | RSKSTGDPWLTDGSYLDGTGFARISFDSQISTTKRFEQELRLVS |
| | | | | YSGVLFFLKQQSQFLCLAVQEGSLVLLYDFGAGLKKAVPLQPPP |
| | | | | PLTSASKAIQVFLLGGSRKRVLVRVERATVYSVEQDNDLELADA |
| | | | | YYLGGVPPDQLPPSLRRLFPTGGSVRGCVKGIKALGKYVDLKRL |
| | | | | NTTGVSAGCTADLLVGRAMTFHGHGFLRLALSNVAPLTGNVYSG |
| | | | | FGFHSAQDSALLYYRASPDGLCQVSLQQGRVSLQLLRTEVKTQA |
| | | | | GFADGAPHYVAFYSNATGVWLYVDDQLQQMKPHRGPPPELQPQP |
| | | | | EGPPRLLLGGLPESGTIYNFSGCISNVFVQRLLGPQRVFDLQQN |
| | | | | LGSVNVSTGCAPALQAQTPGLGPRGLQATARKASRRSRQPARHP |
| | | | | ACMLPPHLRTTRDSYQFGGSLSSHLEFVGILARHRNWPSLSMHV |
| | | | | LPRSSRGLLLFTARLRPGSPSLALFLSNGHFVAQMEGLGTRLRA |
| | | | | QSRQRSRPGRWHKVSVRWEKNRILLVTDGARAWSQEGPHRQHQG |
| | | | | AEHPQPHTLFVGGLPASSHSSKLPVTVGFSGCVKRLRLHGRPLG |
| | | | | APTRMAGVTPCILGPLEAGLFFPGSGGVITLDLPGATLPDVGLE |
| | | | | LEVRPLAVTGLIFHLGQARTPPYLQLQVTEKQVLLRADDGAGEF |
| | | | | STSVTRPSVLCDGQWHRLAVMKSGNVLRLEVDAQSNHTVGPLLA |
| | | | | AAAGAPAPLYLGGLPEPMAV\QP\WPPAYCGCMRRLAVNR/SPP |
| | | | | VAMTRSVEVHGAVGASGCPSPTRTQPTPAPGQAPAAASHRPLCS |
| | | | | PHRCLFGL |
| 802 | A | 3 | 574 | DAWADAWAVVCPDSQEDSETRAQEDSGSEQPPDSVLPDKLKVSW |
| 707 | A | 609 | 785 | LGLEHISSSGEKYYYNCRTEVSQWGKTPKSGLERGQRQKEANKM |
| | | | | AVNSFPKDRDYRREVMQATATSGFASGKSTSGDKPVSHSCTTPS |
| | | | | TSSASGLNPTSAPPTSASAGPCFSVFHSSPIP/TLTSGPKSS*T |
| | | | | IAVLLWKPRCSLIILMWT*SIINEVLTGDVTQASLQTIIHKCLT |
| | | | | AGPSVFKITSLISQAAQLSTQAQASNQSPMSLTSDASSPRIICF |
| | | | | SKE*GTPQT*\PVPIQTFGFSTPPVSSQPKVSTPVVKQGPVSQS |
| | | | | ATQQPVTADKQQGHEPVSPRSLQRSSSQRSPSPGPNHTSNSSNA |
| | | | | SNATVVPQNSSARSTCSLTP/VTSSTLQ*KSTTTIVEQKFHNGE |
| | | | | KPQRVAWKEDRDKKKQTRWQSTASQKIGITEER |
| | | | | ENPSPQEAPAA*SAEPFQAPCSETSEAAPREGGKPPTPPPKILS |
| | | | | EKLKASMGEMQASGPPAPGTVQVSVNGMDDSPEPAKPSQAEGTP |
| | | | | GTPPKDATTSTALPPWDLPP/PVPSPLLLPWGLAWGRPAASLAA |
| | | | | QGTAISGPAGGEGGL |
| 803 | A | 321 | 542 | MGVVLYVMLCASLPFDDTDIPKMLWQQQKGVSFPTHLSISADCQ |
| | | | | DLLKRLLEPDMILRPSIEEVSWHPWLAST* |
| 804 | A | 1 | 513 | MKSTSGEDAVNIIEMTTKDLEYYINSVDTAAPGFERTECNFERS |
| | | | | STGGTLQTLPRPLPLRHFRFRRRSHISGVLSSGAGASNPCPYCV |
| | | | | CEEASKRGSHVQRGISEGLSGVEKRGGLLFFHLTLKRHAGSTES |
| | | | | DTSEPVSTVWFGLDFHWYSGVLDKSLDLAFVICEVDRFQ |
| 805 | A | 4 | 549 | EGTAEAFVNSINAPASERTLWARERTQDLAPLEKHSVGENTMVT |
| | | | | KTHDQPVEEEDRYQGEDPESPFTQSDEGSSETPNSLASEEGNSS |
| | | | | SETGELPVQGDSQSQGDQHGESVQGGHNNNPDTQRQGTPGEKNR |
| | | | | ALEAVVPAVRGEDVQLTEDQEQPARGEHKNQGPRTKGPGAAVEL |
| | | | | NVHSDP |
| 806 | A | 1 | 913 | AHASAEGDAEGEAEGPVGSTLGSYATLTRRPGRSALVRTSPSVT |
| | | | | PTPARGTPRSQSFALRARRKGPPPPPPKRLSSVSGPSPEPPPLD |
| | | | | GSPGPKEGATGPRRRTLSEPAGPSEPPGPPAPAGPASDTEEEEP |
| | | | | GPEGTPPSRGSSGEGLPFAEEGNLTIKQRPKPAGPPPRETPVPP |
| | | | | GLDFNLTESDTVKRRPKCREREPLQTALLAFGVASATPGPAAPL |
| | | | | PSPTPGESPPASSLPQPEPSSLPAQGVPTPLAPSPAMQPPVPPC |
| | | | | PGPGLESSAASRWNGETEPPAAPAALLKVPGAGTAPKPVS |
| 807 | B | 361 | 1371 | MTKTHVIAASKEAFYTWQYRVAKKLTALEINQITRSRKEGRESR |
| | | | | LAIIDISGVLTFFDLDARVTDSTGQQVVGELLKLERRDVWDMKW |
| | | | | AKDNPDLFAMMEKTRMYVFRNLDPEEPIQTSGYICNFEDLEIKS |
| | | | | VLLDEILKDPEHPNKDYLINFEIRSLRDSRALIEKVGIKDASQF |
| | | | | IEDNPHPRLWRLLAEAALQKLDLYTAEQAFVRCKDYQGIKFVKR |
| | | | | LGKLLSESMKQAEVVGYFGRFEEAERTYLEMDRRNTLELDCGLG |
| | | | | RTGSVNFHTFLTLAKLFMALQQRHGIGSLSLAKESLLNVKDLLS |
| | | | | IEPWHSEVYMVDPEEGVPELAIDKAAVA |
| 808 | A | 214 | 916 | RLPTGHQFSGVEGLILLQSPKSVAEGRRRLGVQSGFSLPRFDGS |
| | | | | FFWGQVMKVLRHKYLINFYRAIESTSRVYIILELAQGGDVLEWI |
| | | | | QRYGACSEPLAGKWFSQLTLGIAYLHSKSIVHR*GRCHPDWGLC |
| | | | | PQGGFMHISHFLSFFPLS/TLPPQYLAYSCTLF*SYGQGY**ST |
| | | | | HCMQSIL*NTMVSSRWSSDTILCLSPYFGLCSQLHGFPSSLPCA |
| | | | | IIMVSTSHFLCPHLY |
| 809 | A | 2 | 3708 | FVPDCSVRTSESARRRDQRAQRSGRSPPTSAPSASRAGRRLEAS |
| | | | | EEVFKMKKFNFRKVLDGLTASSPGSGSSSGSNSGGGAGSGSVHP |
| 707 | A | 609 | 785 | LGLEHISSSGEKYYYNCRTEVSQWGKTPKSGLERGQRQKEANKM |
| | | | | AVNSFPKDRDYRREVMQATATSGFASGKSTSGDKPVSHSCTTPS |
| | | | | TSSASGLNPTSAPPTSASAGPCFSVFHSSPIP/TLTSGPKSS*T |
| | | | | IAVLLWKPRCSLIILMWT*SIINEVLTGDVTQASLQTIIHKCLT |
| | | | | AGPSVFKITSLISQAAQLSTQAQASNQSPMSLTSDASSPRIICF |
| | | | | SKE*GTPQT*\PVPIQTFGFSTPPVSSQPKVSTPVVKQGPVSQS |
| | | | | ATQQPVTADKQQGHEPVSPRSLQRSSSQRSPSPGPNHTSNSSNA |
| | | | | SNATVVPQNSSARSTCSLTP/VTSSTLQ*KSTTTIVEQKFHNGE |
| | | | | KPQRVAWKEDRDKKKQTRWQSTASQKIGITEER |
| | | | | AGTAGVLREEIQETLTSEYFQICKTVRHGFPHQPTALAFDPVQK |
| | | | | ILAIGTRTGAIRILGRPGVDCYCQHESGAAVLQLQFLINEGALV |
| | | | | SASSDDTLHLWNLRQKRPAILHSLKFNRERITYCHLPFQSKWLY |
| | | | | VGTERGNTHIVNIESFILSGYVIMWNKAIELSTKTHPGPVVHLS |
| | | | | DSPRDEGKLLIGYENGTVVFWDLKSKRAELRVYYDEAIHSIDWH |
| | | | | HEGKQFMCSHSDGSLTLWNLKSPSRPFQTTIPHGKSQREGRKSE |
| | | | | SCKPILKVEYKTCKNSEPFIIFSGGLSYDKACRRPSLTIMHGKA |
| | | | | ITVLEMDHPTVEFLTLCETPYPNEFQEPYAVVVLLEKDLIVVDL |
| | | | | TQSNFPIFENPYPMDIHESPVTCTAYFADCPPDLILVLYSIGVK |
| | | | | HKKQGYSNKEWPISGGAWILGAQTYPEIIITGHADGSIKFWDAS |
| | | | | AITLQMLYKLKTSKVFEKQKVGEGKQTCEIVEEDPFAIQMIYWC |
| | | | | PESRIFCVSGVSAYVIIYKFSRHEITTEIVSLEVRLQYDVEDII |
| | | | | TPEPETSPPFPDLSAQLPSSRSLSGSTNTVASEGVTKDSIPCLN |
| | | | | VKTRPVRMPPGYQAELVIQLVWVDGEPPQQITSLAVSSAYGIVA |
| | | | | FGNCNGLAVVDFIQKTVLLSMGTIDLYRSSDLYQRQPRSPRKNK |
| | | | | QFIADNFCMRGLSNFYPDLTKRIRTSYQSLTELNDSPVPLELER |
| | | | | CKSPTSDHVNGHCTSPTSQSCSSGKRLSSADVSKVNRWGPGRPP |
| | | | | FRKAQSAACMEISLPVTTEENRENSYNRSRSSSISSIDKDSKEA |
| | | | | ITALYFMDSFARKNDSTISPCLFVGTSLGMVLIISLNLPLADEQ |
| | | | | RFTEPVMVLPSGTFLSLKGAVLTFSCMDRMGGLMQPPYEVWRDP |
| | | | | NNIDENEKSWRRKVVMNSSSASQEIGDHQYTIICSEKQAKVFSL |
| | | | | PSQTCLYVHNITETSFILQANVVVMCSSACLACFCANGHIMIMS |
| | | | | LPSLRPMLDVNYLPLTDMRIARTFCFTNEGQALYLVSPTEIQRL |
| | | | | TYSQEMCDNLQDMLGDLFTPIETPEAQNRGFLKGLFGGSGQTFD |
| | | | | REELFGEASAGKASRSLAQHIPGPGSIEGMKGAAGGVMGELTRA |
| | | | | RIALDERGQRLGELEEKTAGMMTSAEAFSKHAHELMLKYKDKKW |
| | | | | YQF |
| 810 | A | 1 | 993 | MPSGWSGSPIDWLAWDNLEQPPLYPKKLVQTYSVFPNQDEMSDV |
| | | | | VVQPYNSLLTLKRLTQNADCVEIKDYGPAKGGKKKDPNAPKRPP |
| | | | | SGFFLFCSEFCPKSKSTNPGIPIGDVAKKLGEMWKNLNDSEKQP |
| | | | | YITQAAKLKEKYEKDVAVYKSKGKSDGAKGPAKVAQKKVEEEDE |
| | | | | DEEFCILHSAAELGGDLEPHPEKGLPEDDPDIVVKGWLYREPRG |
| | | | | GGARPWLPPRRAWFVLTRDSLDQFSSSGKGARRLGSLVLTSLCS |
| | | | | VTGPERRRKETGLWSVTVSGRKHSVRLCSPRQAEAERWGVALRE |
| | | | | VIASKAPLETPTQLLLRDIQPPE |
| 811 | A | 1 | 641 | SLRLAWHEGKLHFSVYDFDRFSRHDLIGQVVLDNLLELAEQPPD |
| | | | | RPLWRDIVEGGSEKADLGELNFSLCYLPTAGRLTVTIIKASNLK |
| | | | | AMDLTGFSDPYVKASLISEGRRLKKRKTSIKKNTLNPTYNEALV |
| 707 | A | 609 | 785 | LGLEHISSSGEKYYYNCRTEVSQWGKTPKSGLERGQRQKEANKM |
| | | | | AVNSFPKDRDYRREVMQATATSGFASGKSTSGDKPVSHSCTTPS |
| | | | | TSSASGLNPTSAPPTSASAGPCFSVFHSSPIP/TLTSGPKSS*T |
| | | | | IAVLLWKPRCSLIILMWT*SIINEVLTGDVTQASLQTIIHKCLT |
| | | | | AGPSVFKITSLISQAAQLSTQAQASNQSPMSLTSDASSPRIICF |
| | | | | SKE*GTPQT*\PVPIQTFGFSTPPVSSQPKVSTPVVKQGPVSQS |
| | | | | ATQQPVTADKQQGHEPVSPRSLQRSSSQRSPSPGPNHTSNSSNA |
| | | | | SNATVVPQNSSARSTCSLTP/VTSSTLQ*KSTTTIVEQKFHNGE |
| | | | | KPQRVAWKEDRDKKKQTRWQSTASQKIGITEER |
| | | | | FDVAPESVENVGLSIAVVDYDCIGHNEVIGVCRVGPDAADPHGR |
| | | | | EHWAEMLANPRKPVEHWHQLVEEKTVTSFTKGSKGLS |
| 812 | A | 340 | 509 | REKEMDMSDPNFWTVLSNFTLPHLRSGNRLRRTQSCRTSNRKSL |
| | | | | IGNGQSPALPRP |
| 813 | A | 37 | 372 | MSFGPYFYVCFIPILLYSLNTKGYGNPYPCFPSTPPKFPFGQPR |
| | | | | ERSQPQPQPLLPLPWFCRAVLACWEGLTRSVCSSRCLQGEGRKA |
| | | | | KWGGRQPPQALWPQPAEGRRQPA* |
| 814 | A | 3 | 379 | YNQKVDLFSLGIIFFEMSYHPMVTASERIFVLNQLRDPTSPKFP |
| | | | | EDFDDGEHAKQKSVISWLLNHDPAKRPTATELLKSELLPPPQME |
| | | | | ESELHEVLHHTLTNVDGKAYRTIDGPRSFRQRISPAI |
| 815 | A | 139 | 445 | SVRHLKYSLFKKSLLGSVSDNGIVTLWDVNSQSPYHNFDRVHKA |
| | | | | PASGICFSPVNELLFVTIGLDKRIILYDTSSKKLVKTLVADTPL |
| | | | | TAVDFMPDGATLAI |
| 816 | A | 264 | 799 | WESDVGEGLRPPPPPPPPGRRRTQEPRARDAATVIFACPAALLE |
| | | | | TLIAYGSSSPSFCKHRAARPLIFLLHRLTAEATARCPICALEAR |
| | | | | NPGRWGICASWPGMKTPFGKAAAGQRSRTGAGHGSVSVTMIKRK |
| | | | | AAHKKHRSRPTSQPRGNIVGCIIQHGWKDGDEPLTQWKGTVLDQ |
| | | | | LL |
| 817 | A | 127 | 1271 | TFTSGKTAVGKLAQPYKATLVSSAGASQVKWNKKNANCLATSHD |
| | | | | GDVRIWDKRKPSTAVEYLAAHLSKIHGLDWHPDSEHILATSSQD |
| | | | | NSVKIWDYRQPRKYLNILPCQVPVWKARYTPFSNGLVTVMVPQL |
| | | | | RRENSLLLWNVFDLNTPVHTFVGHDDVVLEFQWRKQKEGSKDYQ |
| | | | | LVTWSRDQTLRMW/PVDSQMQRLCANDILDGVDEFIESISLLPE |
| | | | | PEKTLHTEDTDHQHTASHGEEEALKEDPPRNLLEERKSDQLGLP |
| | | | | QTLQQEFSLINVQIRNVNVEMDAADRSCTVSVHCSNHRVKMLVK |
| | | | | FPAQYPNNAAPSFQFINPTTITSTMKAKLLKILKDTALQKVKRG |
| | | | | QSCLEPCLRQLVSCLESFVNQEDSASSNPFA |
| 818 | A | 398 | 1 | DLVCKISGFGRGPRDRSEAVYTTMSGRSPALWAAPETLQFGHFS |
| | | | | SASDVWSFGIIMWEVMAFGERPYWDMSGQDVIKAVEDGFRLPPP |
| | | | | RNCPNLMHRLMLDCWQKDPGERPRFSQIHSILSKMVQDPEPPNV |
| 819 | A | 2619 | 326 | GPSGPKGYRGQKGAKGNMGEPGEPGQKGRQGDRGIEGPIGFPGP |
| | | | | KGVPGFKGEKGEFGADGRKGAPGLAGKNGTDGQKGKLGRIGPPG |
| | | | | CKGDPGNRGPDGYPGEAGSPGERGDQGGKGDPWPP\GRRGPPGE |
| | | | | IGAKGSKGYQGNNGAPGSPGVKGAKGGPGPRGPKGEPGRRGDPG |
| | | | | TKGSPGSDGPKGEKGDPGPEGPRGLAGEVGNKGAKGDRGLPGPR |
| | | | | GPQGALGEPGKQGSRGDPGDAGPRGDSGQPGPKGDPGRPGFSYP |
| | | | | GPRGAPGEKGEPGPRGPEGGRGDFGLKGEPGRKGEKGEPADPGP |
| | | | | PGEPGPRGPRGVPGPEGEPGPPGDPGLTECDVMTYVRETCGCCD |
| 707 | A | 609 | 785 | LGLEHISSSGEKYYYNCRTEVSQWGKTPKSGLERGQRQKEANKM |
| | | | | AVNSFPKDRDYRREVMQATATSGFASGKSTSGDKPVSHSCTTPS |
| | | | | TSSASGLNPTSAPPTSASAGPCFSVFHSSPIP/TLTSGPKSS*T |
| | | | | IAVLLWKPRCSLIILMWT*SIINEVLTGDVTQASLQTIIHKCLT |
| | | | | AGPSVFKITSLISQAAQLSTQAQASNQSPMSLTSDASSPRIICF |
| | | | | SKE*GTPQT*\PVPIQTFGFSTPPVSSQPKVSTPVVKQGPVSQS |
| | | | | ATQQPVTADKQQGHEPVSPRSLQRSSSQRSPSPGPNHTSNSSNA |
| | | | | SNATVVPQNSSARSTCSLTP/VTSSTLQ*KSTTTIVEQKFHNGE |
| | | | | KPQRVAWKEDRDKKKQTRWQSTASQKIGITEER |
| | | | | CEKRCGALDVVFVIDSSESIGYTNFTLEKNFVINVVNRLGAIAK |
| | | | | DPKSETGTRVGVVQYSHEGTFEAIQLDDERIDSLSSFKEAVKNL |
| | | | | EWIAGGTWTPSALKFAYDPLIKESRRQKTRVFAVVITDGRHDPR |
| | | | | DDDLNLRALCDRDVTVTAIGIGDMFHEKHESENLYSIACDKPQQ |
| | | | | VRNMTLFSDLVAEKFIDDMEDVLCPDPQIVCPDLFCQTELSVAQ |
| | | | | CTQRPVDIVFLLDGSERLGEQNFHKARRFVEQVARRLTLARRDD |
| | | | | DPLNARVALLQFGGPGEQQVAFPLSHNLTAIHEALETTQYLNSF |
| | | | | SHVGAGVVHAINAIVRSPRGGARRHAELSFVFLTDGVTGNDSLH |
| | | | | ESAHSMRKQNVVPTVLALGSDVDMDVLTTLSLGDRAAVFHEKDY |
| | | | | DSLAQPGFFDRFIRWIC |
| 820 | A | 2 | 860 | PRVRELKEILDRKGHFSENETRWIIQSLASAIAYLHNNDIVHRD |
| | | | | LKLENIMVKSSLIDDNNEINLNIKVTDFGLAVKKQSRSEAMLQA |
| | | | | TCGTPIYMAPEVISAHDYSQQCDIWSIGVVMYMLLRGEPPFLAS |
| | | | | SEEKLFELIRKGELHFENAVWNSISDCAKSVLKQLMKVDPAHRI |
| | | | | TAKELLDNQWLTGNKLSSVRPTNVLEMMKEWKNNPESVEENTTE |
| | | | | EKNKPSTEEKLKSYQPWGNVPETNYTSDEEEEKQVGRIIAAFLP |
| | | | | SVKYPHHTWNIFLQICLFVVSL |
| 821 | A | 1 | 1003 | LQDSAREYSELLDKASETDDPYERMVLVAAFAVSGYCSTYFRAG |
| | | | | SKPFNPVLGETYECIREDKGFRFFSEQVSHHPPISACHCESKNF |
| | | | | VFWQDIRWKNKFWGKSMEILPVGTLNVMLPKYGDYYVWNKVTTC |
| | | | | IHNILSGRRWIEHYGEVTIRNTKSSVCICKLTFVKVNYWNSNMN |
| | | | | EVQGVVIDQEGKAVYRLFGKWHEGLYCGVAPSAKCIWRPGSMPT |
| | | | | NYELYYGFTRFAIELNELDPVLKDLLPPTDARFRPDQRFLEEGN |
| | | | | LEAAASEKQRVEELQRSRRRYMEENNLEHIPKFFKKVIDANQRE |
| | | | | AWVSNDTYWELRKDPGFSKVDSPVLW |
| 822 | A | 3038 | 476 | VALTTSMCCNKQVIVIDKIKSASIADRCGALHVGDHILSIDGTS |
| | | | | MEYCTLAEATQFLANTTDQVKLEILPHHQTRLALKGPDHVKIQR |
| | | | | SDRQLTWDSWASNHSSLHTNHHYNTYHPDHCRVPALTFPKAPPP |
| | | | | NSPPALVSSSFSPTSMSAYSLSSLNMGTLPRSLYSTSPRGTMMR |
| | | | | RRLKKKDFKSSLSLASSTVGLAGQVVHTETTEVVLTADPVTGFG |
| | | | | IQLQGSVFATETLSSPPLISYIEADSPAERCGVLQIGDRVMAIN |
| | | | | GIPTEDSTFEEASQLLRDSSITSKVTLEIEFDVAESVIPSSGTF |
| | | | | HVKLPKKHNVELGITISSPSSRKPGDPLVISDIKKGSVAHRTGT |
| | | | | LELGDKLLAIDNIRLDNCSMEDAVQILQQCEDLVKLKIRKDEDN |
| | | | | SDEQESSGAIIYTVELKRYGGPLG\ITISGTEEP\FDL*IISSL |
| | | | | TKGGLAERTGAIHIGDRIL\AINSSSLKGKPLSEAIHLLQMAGE |
| | | | | TVTLKIKKQTDAQSASSPKKFPISSHLSDLGDVEEDSSPAQKPG |
| | | | | KLSDMYPSHGCPSVDSAVDSWDGSA\IDTS\YGTEGT\SFQASG |
| 707 | A | 609 | 785 | LGLEHISSSGEKYYYNCRTEVSQWGKTPKSGLERGQRQKEANKM |
| | | | | AVNSFPKDRDYRREVMQATATSGFASGKSTSGDKPVSHSCTTPS |
| | | | | TSSASGLNPTSAPPTSASAGPCFSVFHSSPIP/TLTSGPKSS*T |
| | | | | IAVLLWKPRCSLIILMWT*SIINEVLTGDVTQASLQTIIHKCLT |
| | | | | AGPSVFKITSLISQAAQLSTQAQASNQSPMSLTSDASSPRIICF |
| | | | | SKE*GTPQT*\PVPIQTFGFSTPPVSSQPKVSTPVVKQGPVSQS |
| | | | | ATQQPVTADKQQGHEPVSPRSLQRSSSQRSPSPGPNHTSNSSNA |
| | | | | SNATVVPQNSSARSTCSLTP/VTSSTLQ*KSTTTIVEQKFHNGE |
| | | | | KPQRVAWKEDRDKKKQTRWQSTASQKIGITEER |
| | | | | Y\NFNTYDWRSPKQRGS\LSPVT\KPRSQTYPDVGLSYEDWDRS |
| | | | | TASGFAGAA\DSAETEQEENFWSQALEDLETCGQSGILRELEAT |
| | | | | IMSGSTMSLNHEAPTPRSPAGSDRPSFQERSSSRPHYSQTTRSN |
| | | | | TLPSDVGRKSVTLRKMKQEIKEIMSPTPVELHKVTLYKDSDMED |
| | | | | FGFSVADGLLEKGVYVKNIRPAGPGDLGGLKPYDRLLQVNHVRT |
| | | | | RDFDCCLVVPLIAESGNKLDLVISRNPLASQKSIDQQSLPGD*S |
| | | | | EQNSAFFQQPSHGGNLETREPTNTL |
| 823 | A | 1100 | 1741 | RRTFSRASVRRREFLQAISKPCGSATAPRGCPPPWPLSGIS/HT |
| | | | | PNVKVSRLLILGGANVNYRTEVLNNAPILCVQSHLGHEEVVTLL |
| | | | | LEFGACLDGTSENGMTALCYAAAAGHMKLVCLLTKKGVRVDHLD |
| | | | | KKGQCALVHSALRGHGDILQYLLTCEWSPGPPQPGTLRKSHALQ |
| | | | | QALTAAASMGHSSVVQCLLGMEKEHEVEVNGTDTLWGET |
| 824 | A | 998 | 276 | EEGEERQGEGEEEEDGEELRRGLLRPAGVGGRMASVSSATFSGH |
| | | | | GARSLLQFLRLVGQLKRVPRTGWVYRNVQRPESVSDHMYRMAVM |
| | | | | AMVIKDDRLNKDRCVRLALVHDMAECIVGDIAPADNIPKEEKHR |
| | | | | REEEAMKQITQLLPEDLRKELYELWE\EVYMEYETQSSAEAKFV |
| | | | | KQLDQCEMILQASEYEDLEHKPGRLQDFYDSTAGKFNHPEIVQL |
| | | | | VSELEAERSTNIAAAASEPHS |
| 825 | A | 2 | 454 | SVKRQPGFGQTTAKRHPSQGQQAVVKAALSILLNKAVLHGCPLP |
| | | | | RAELDQHTADFKGGSFPLSIVSSYNTCNKKKGESGAWRKVNNSP |
| | | | | RRKSGRFSLPTWNKPDLSTEGMKNKTISQLNCNRNASLSKQKSL |
| | | | | ENDLSLTLNLDQRLSLGSD |
| 826 | A | 2 | 414 | GSGLYRGPTPGGQCIWKPNSMPPDHERNFGFTQFALELNELTAE |
| | | | | LKRSLPSTDTRLRPDQRYLEEGNIQAAEAQKRRIEQLQRDRRKV |
| | | | | MEENNIVHQARFFRRQTDSSGKEWWVTNNTYWRLRAEPGYGNMD |
| | | | | GAVLW |
| 827 | A | 16 | 691 | RFVEDRIPYQDRESYSQPAWHHRGPPQRDWKWEKDGFNNTRKNS |
| | | | | FPHSLRNGGGPRGRSGWHKGVAGGSSTWFHNHSNSGGGWLSNSG |
| | | | | AVDWNHNGTGRNSSWLSEGTGGFSSWHMNNSNGNWKSSVRSTNN |
| | | | | WNYSGPGDKFQPGRNRNSNCQMEDMTMLWNKKSNKSNKYSHDRY |
| | | | | NWQRQENDKLGTVATYRGPSEGFTSDKFPSEGLLDFNFEQLESQ |
| | | | | TTKQA |
| 828 | A | 1 | 522 | RGGVSDMLIKVQATEQMGYCPIQCEKLCYLPGNSKCSSVYENCL |
| | | | | EQSRAIGNVHPRGVQSQRDTSLLKHTCRVDLFDDPCYINTQALQ |
| | | | | STPGSAGNQ\GQPNHWGAHGTAERH/LETVQPGATAQPASSHSL |
| | | | | PHIKQQLWSEECYHGKLSRKAAESLLVKDGDFLVRESATSPGQN |
| 829 | A | 3 | 500 | RVVEFEAFNMDSAYSEQAAVLLQRSRPSRGGTSAWGKCSLPKFT |
| | | | | VPKGRLGVTRIGDLSLQDMRKVPSLALIELTALCDILGLDLKRS |
| 707 | A | 609 | 785 | LGLEHISSSGEKYYYNCRTEVSQWGKTPKSGLERGQRQKEANKM |
| | | | | AVNSFPKDRDYRREVMQATATSGFASGKSTSGDKPVSHSCTTPS |
| | | | | TSSASGLNPTSAPPTSASAGPCFSVFHSSPIP/TLTSGPKSS*T |
| | | | | IAVLLWKPRCSLIILMWT*SIINEVLTGDVTQASLQTIIHKCLT |
| | | | | AGPSVFKITSLISQAAQLSTQAQASNQSPMSLTSDASSPRIICF |
| | | | | SKE*GTPQT*\PVPIQTFGFSTPPVSSQPKVSTPVVKQGPVSQS |
| | | | | ATQQPVTADKQQGHEPVSPRSLQRSSSQRSPSPGPNHTSNSSNA |
| | | | | SNATVVPQNSSARSTCSLTP/VTSSTLQ*KSTTTIVEQKFHNGE |
| | | | | KPQRVAWKEDRDKKKQTRWQSTASQKIGITEER |
| | | | | KAGKWKAAETRLFGVPLDSLLEADHKVLPSTQVPLVLQALLSCL |
| | | | | EKRGLDMEGILRVPGSQARVKVHPEAADTFAHG |
| 830 | A | 3 | 232 | HEQDKNKYNTPKYRMIVRVTNRDIICQIAYARIEGDMIVCATYA |
| | | | | HELPKYGVKVGLTYYACTYSTVVLVARTLLDT |
| 831 | A | 3 | 497 | WRGLMVMSAIEKLLRQVDWGQLDYLVVDMPPGTGDVQLSVSQNI |
| | | | | PITGAVIVSTPQDIALMDAHKGAEMFRRVHVPVLGLVQNMSVFQ |
| | | | | CPKCKHKTHIFGADGARKLAQTLGLEVLGDIPLHLNIREASDTG |
| | | | | QPIVFSQPESDEAKAYLRIAVEVVRRLPSPSE |
| 832 | A | 196 | 545 | GLSRAAMVWWQQAQPSLEMQNDAGEFVDLYVPRKCSASNRIIGA |
| | | | | KDHASIQMNVA\RLTRSQAGLMASLKLMLSAGPFVGWVSQMIPF |
| | | | | SDWPR\RWHRLKELLTGENHRCGIFVINK |
| 833 | A | 2 | 877 | GTRNGQFEPRRGRAWEGSAGGLRAPGAAAGGPGVQPRGSG/LPG |
| | | | | NAIRAGVNPGRGPASPFWDLSLPWDLWPPPTDHAPGAPDFPAVE |
| | | | | GR\PWAGGRPPWPVSGVLGSRVCGPLYSTSPAGPG/SGGLSPSQ |
| | | | | GGPAGAGGDAG/LPGRCPSAPWRAGSRPAASCPDWIPGPQGLWL |
| | | | | HRNPTS/GPPSQIGEGAEQGDEGVADAPQIQCKN/GAEDPPAED |
| | | | | EPPQVPEAGEEDAVPAEEGPGGTPETQADQVRERPEAHLAEGGA |
| | | | | KGSPRRLADPQDLPAGQMSLAPPFPPVAAVIRSNK |
| 834 | A | 2 | 877 | GTRNGQFEPRRGRAWEGSAGGLRAPGAAAGGPGVQPRGSG/LPG |
| | | | | NAIRAGVNPGRGPASPFWDLSLPWDLWPPPTDHAPGAPDFPAVE |
| | | | | GR\PWAGGRPPWPVSGVLGSRVCGPLYSTSPAGPG/SGGLSPSQ |
| | | | | GGPAGAGGDAG/LPGRCPSAPWRAGSRPAASCPDWIPGPQGLWL |
| | | | | HRNPTS/GPPSQIGEGAEQGDEGVADAPQIQCKN/GAEDPPAED |
| | | | | EPPQVPEAGEEDAVPAEEGPGGTPETQADQVRERPEAHLAEGGA |
| | | | | KGSPRRLADPQDLPAGQMSLAPPFPPVAAVIRSNK |
| 835 | A | 2 | 877 | GTRNGQFEPRRGRAWEGSAGGLRAPGAAAGGPGVQPRGSG/LPG |
| | | | | NAIRAGVNPGRGPASPFWDLSLPWDLWPPPTDHAPGAPDFPAVE |
| | | | | GR\PWAGGRPPWPVSGVLGSRVCGPLYSTSPAGPG/SGGLSPSQ |
| | | | | GGPAGAGGDAG/LPGRCPSAPWRAGSRPAASCPDWIPGPQGLWL |
| | | | | HRNPTS/GPPSQIGEGAEQGDEGVADAPQIQCKN/GAEDPPAED |
| | | | | EPPQVPEAGEEDAVPAEEGPGGTPETQADQVRERPEAHLAEGGA |
| | | | | KGSPRRLADPQDLPAGQMSLAPPFPPVAAVIRSNK |
| 836 | A | 167 | 691 | MGWVWTLCTASACLTLLFWSQTPGKAFQIPCPPPHLSHWCLSPM |
| | | | | QMDDGCARLCVLWTAWMRWRVLMCSCRVWATDLGIFLGVALGNE |
| | | | | PLEMWPLTQNEECTVTGFLRDKLQYRSRLQYMKHYFPINYKIRV |
| | | | | PYEGVFRIANVTRLRAQGSERELRYLGVLVSLSATESVHDELL |
| 837 | A | 167 | 691 | MGWVWTLCTASACLTLLFWSQTPGKAFQIPCPPPHLSHWCLSPM |
| | | | | QMDDGCARLCVLWTAWMRWRVLMCSCRVWATDLGIFLGVALGNE |
| 707 | A | 609 | 785 | LGLEHISSSGEKYYYNCRTEVSQWGKTPKSGLERGQRQKEANKM |
| | | | | AVNSFPKDRDYRREVMQATATSGFASGKSTSGDKPVSHSCTTPS |
| | | | | TSSASGLNPTSAPPTSASAGPCFSVFHSSPIP/TLTSGPKSS*T |
| | | | | IAVLLWKPRCSLIILMWT*SIINEVLTGDVTQASLQTIIHKCLT |
| | | | | AGPSVFKITSLISQAAQLSTQAQASNQSPMSLTSDASSPRIICF |
| | | | | SKE*GTPQT*\PVPIQTFGFSTPPVSSQPKVSTPVVKQGPVSQS |
| | | | | ATQQPVTADKQQGHEPVSPRSLQRSSSQRSPSPGPNHTSNSSNA |
| | | | | SNATVVPQNSSARSTCSLTP/VTSSTLQ*KSTTTIVEQKFHNGE |
| | | | | KPQRVAWKEDRDKKKQTRWQSTASQKIGITEER |
| | | | | PLEMWPLTQNEECTVTGFLRDKLQYRSRLQYMKHYFPINYKIRV |
| | | | | PYEGVFRIANVTRLRAQGSERELRYLGVLVSLSATESVHDELL |
| 838 | A | 145 | 1815 | PCGRVPAPLPPGRAPITGTRWP/PLGTQPDLGSALYQENYKQMK |
| | | | | ALVNQLHERVEHIKLGGGEKARALHISRGKLLPRERIDNLIDPG |
| | | | | SPFLELSQFAGYQLYDNEEVPGGGIITGIGRVSGVECMIIANDA |
| | | | | TVKGGAYYPVTVKKQLRAQEIAMQNRLPCIYLVDSGGAYLPRQA |
| | | | | DVFPDRDHFGRTFYNQAIMSSKNIAQIAVVMGSCTAGGAYVPAM |
| | | | | ADENIIVRKQGTIFLAGPPLVKAATGEEVSAEDLGGADLHCRKS |
| | | | | GVSDHWALDDHHALHLTRKVVRNLNYQKKLDVTIEPSEEPLFPA |
| | | | | DELYGIVGANLKRSFDVREVIARIVDGSRFTEFKAFYGDTLVTG |
| | | | | FARIFGYPVGIVGNNGVLFSESAKKGTHFVQLCCQRNIPLLFLQ |
| | | | | NITGFMVGREYEAEGIAKDGAKMVAAVACAQVPKITLIIGGSYG |
| | | | | AGNYGMCGRAYSPRFLYIWPNARISVMGGEQAANVLATITKDQR |
| | | | | AREGKQFSSADEAALKEPIIKKFEEEGNPYYSSARVWDDGIIDP |
| | | | | ADTRLVLGLSFSAALNAPIEKTDFGIFRM |
| 839 | A | 1401 | 1731 | RRSLLRPPPQALPMMAPSHHPSPAPLPASPPPPAPPPPLAPPRD |
| | | | | PLALRAPPVPQAPRAPPAPRALQAPPAPRARPPARGRRGGTAPG |
| | | | | PRWPRPGARVPGARGQAPGSRP |
| 840 | A | 2 | 1081 | FVTDFPARSMAATSLMSALAARLLQPAHSCSLRLRPFHLAAVRN |
| | | | | EAVVISGRKLAQQIKQEVRQEVEEWVASGNKRPHLSVILVGENP |
| | | | | ASHSYVLNKTRAAAVVGINSETIMKPASISEEELLNLINKLNND |
| | | | | DNVDGLLVQLPLPEHIDERRICNAVSPDKDVDGFHVINVGRMCL |
| | | | | DQYSMLPATPWGVWEIIKRTGIPTLGKNVVVAGRSKNVGMPIAM |
| | | | | LLHTDGAHERPGGDATVTISHRYTPKEQLKKHTILADIVISAAG |
| | | | | IPNLITADMIKEGAAVIDVGINRVHDPVTAKPKLVGDVDFEGVR |
| | | | | QKAGYITPVPGGVGPMTVAMLMKNTIIAAKKVLRLEEREVLKSK |
| | | | | ELGVATN |
| 841 | A | 1 | 1197 | MAWPCISRLCCLARRWNQLDRSDVAVPLTLHGYSDLDSEEPGTG |
| | | | | GAASRRGQPPAGARDSGRDVPLTQYQRDFGLWTTPAGPKDPPPG |
| | | | | RGPGAGGRRGKSSAQSSAPPAPGARGVYVLPIGDADAAAAVTTS |
| | | | | YRYGLGRDRNESPPCGGRTRRPGARGMGWAAERRRLEPGSHATS |
| | | | | ELPAASEVTPVWSVGTAGGAFAAPCPETVLEHPRAGSAPLPSQP |
| | | | | PSWGQPSEWPAFSRVGTGLPLTPTAGPSRARGARRPCPPALPGH |
| | | | | CLLDRTYTGLQTLGAETLLAVVNSAAMNVGVQVVDVELHRHSLG |
| | | | | EDCIYPQSSESDISDAPPSLPLTIPAPVKASSPIKQSHEPVPDT |
| | | | | SVEKGS\PGSCPFHL*GPLSHLGSSPGFLLWRPPGLLSSVALVA |
| | | | | SCS |
| 842 | A | 1 | 2775 | MHVERRVCHAVSKYNVTLSCVAGGLAAKSSGLELIWLCDLLVRE |
| 707 | A | 609 | 785 | LGLEHISSSGEKYYYNCRTEVSQWGKTPKSGLERGQRQKEANKM |
| | | | | AVNSFPKDRDYRREVMQATATSGFASGKSTSGDKPVSHSCTTPS |
| | | | | TSSASGLNPTSAPPTSASAGPCFSVFHSSPIP/TLTSGPKSS*T |
| | | | | IAVLLWKPRCSLIILMWT*SIINEVLTGDVTQASLQTIIHKCLT |
| | | | | AGPSVFKITSLISQAAQLSTQAQASNQSPMSLTSDASSPRIICF |
| | | | | SKE*GTPQT*\PVPIQTFGFSTPPVSSQPKVSTPVVKQGPVSQS |
| | | | | ATQQPVTADKQQGHEPVSPRSLQRSSSQRSPSPGPNHTSNSSNA |
| | | | | SNATVVPQNSSARSTCSLTP/VTSSTLQ*KSTTTIVEQKFHNGE |
| | | | | KPQRVAWKEDRDKKKQTRWQSTASQKIGITEER |
| | | | | LGQLTGPVCKVRTPALIYGRHHQPPLPRPLPTLTCAASRWPQPE |
| | | | | EATAPPGEGGQKDRALLPGIPAGPKDQCQNRRKISSRTATRPEP |
| | | | | EPPQDRSQNRRKTSARTAEPQGLSLPEDDDPAPLSCRLGCLLTH |
| | | | | CLPSWVPCCPPESTTLDVVEVESYDPYTDSWTPVSPALKYVSNF |
| | | | | SAAGCRGRLYLVGSSACKYNALALQCYNPVTDAWSVIASPFLPK |
| | | | | YLSSPRCAALHGELYLIGDNTKKVYVYDPGANLWQKVQSQHSLH |
| | | | | ENGALVPLGDALYVTGGRWQGMEGDYHVEMEAYDTVRDTWTRHG |
| | | | | ALPRLWLYHGASTVFLDVSNKKTEGYRPLLQLVGPSVDPAESMC |
| | | | | MDGECANGLRREGTATYTGKMLHLRGRVIHRPSPVPGVVSADRS |
| | | | | EVWLLLPDSAAPGTWQGSQSLLPHPVNQDRVRPPFPSGLFSKEF |
| | | | | PGNSSPRCECKGFGAWTAEQRVVRLGRLLGTAAPIFPPQHPGLR |
| | | | | IGQPAPKRRPCIPPDQPGTKGSDLAAGFVSDKRAQSALKSQGPS |
| | | | | LAALPGAQIAQGLSQEGPSQNCAQCQHQSGCSADRNGNFRKHHC |
| | | | | PCFGLPGPPGPPGPQGPPGPIIPPEALLKEFQLLLKGAVRQRER |
| | | | | AEPEPCTCGPAGPVAASLAPVSATAGEDDDDVAAFLCRLRRDAL |
| | | | | VERRALHELGVYYLPDAEGAFRRGPGLNLTSGQYRAPVAGFYAL |
| | | | | AATLHVALGEPPRRGPPRPRDHLRLLICIQSRCQRNACRQAPEE |
| | | | | RPRPLGGSPGLSQHGEHGSRGSVCMREVLRPCRAGTRWRKSLAL |
| | | | | QKLGSHPLHTHYQGRGRKHQGSHLLSSEREVTAKNLNYECRSRT |
| | | | | GGKGRLRLILLFVQPVEVAGLPVPGRYLQGSSVPWNLGDTFKSKY |
| 843 | A | 1204 | 193 | PDGHLALMSQPREVREFNGDHFLLERAIRADFALVKGWKADRAG |
| | | | | NVVFRRSARNFNVPMCKAADVTAVEVG/AFPPEDIHVPNIYVGR |
| | | | | VIKGQKYEKRIERLTIRKEEDGDAGKEEDARTRIIRRAALEFED |
| | | | | GMYANLGIGIPLLASNFISPSMTVHLHSENGILGLGPFPTEDEV |
| | | | | DADLINAGKQTVTVLPGGCFFASDDSFAMIRGGHIQLTMLGAMQ |
| | | | | VSKYGDLANWMIPGKKVKGMGGAMDLVSSQKTRVVVTMQHCTKD |
| | | | | NTPK\IMEKCTMPLTGK\RCVDRIITEKPVFDVHRKKELTLREL |
| | | | | WEGLRVDD\IKKSTGCAFAVSPNLRPMQQVAP |
| 844 | A | 707 | 858 | MSRFLLPREGCLLIVFMLCEKTLPFLFTLKEYTFIPEHRTTDIN |
| | | | | CVNTHE |
| 845 | A | 3 | 372 | MSPGIIQQLLSCSCHLPKDQQAKLPPTTLEKYGYSTGAVTLLTL |
| | | | | GSMLGTALVLFHSCEENYRLILQLFVGLAVGTLSGDALLHLIPQ |
| | | | | VLGLHKQEAPEFGHFHESKGHIWKLMGLIGGIHGF |
| 846 | A | 1420 | 1855 | KAQGLTKKVKSEKQPVKRLPAKFLQLW*EKQKRSSSSQDKDKDS |
| | | | | RCTRQHCTEEDEEEDEEEEEESFMTSREMIPERNKQEKESDDAS |
| | | | | TVNEETSEENNEMEESDVSQ/D*ERFTTFWKVVKTKALKVSGSS |
| | | | | DCRETEELVGSNSQ |
| 707 | A | 609 | 785 | LGLEHISSSGEKYYYNCRTEVSQWGKTPKSGLERGQRQKEANKM |
| | | | | AVNSFPKDRDYRREVMQATATSGFASGKSTSGDKPVSHSCTTPS |
| | | | | TSSASGLNPTSAPPTSASAGPCFSVFHSSPIP/TLTSGPKSS*T |
| | | | | IAVLLWKPRCSLIILMWT*SIINEVLTGDVTQASLQTIIHKCLT |
| | | | | AGPSVFKITSLISQAAQLSTQAQASNQSPMSLTSDASSPRIICF |
| | | | | SKE*GTPQT*\PVPIQTFGFSTPPVSSQPKVSTPVVKQGPVSQS |
| | | | | ATQQPVTADKQQGHEPVSPRSLQRSSSQRSPSPGPNHTSNSSNA |
| | | | | SNATVVPQNSSARSTCSLTP/VTSSTLQ* KSTTTIVEQKFHNGE |
| | | | | KPQRVAWKEDRDKKKQTRWQSTASQKIGITEER |
| 847 | A | 384 | 3 | GGGID/SDASLVIAGVRLEDEGRYRCELINGIEDESVALTLSLE |
| | | | | GEALPLPPHSCVAAGPPRLGLPGLLPSISSAPLGTPAPSPRPRR |
| | | | | PSSPSAPIRWPSPGSPPPPRCGVSVPTQPGPVPVQLLRGVY |
| 848 | A | 581 | 367 | QDSALLQLHGL*SLVDKLSPPGQRRLDLFSCLLRHRLKLSTSEG |
| | | | | VRIQSALQAFNAKLPNTMDYDTTKLCS |
| 849 | A | 33 | 512 | TAARCQGGPTHVPAFVGTACPTRIPGHAPARQCREYYY*YYYDF/ |
| | | | | WKEPRRCHALLLPPWAGLEVGMPPSHTQLGMHPAPPPPHLEVK |
| | | | | AQG\PSNRQRTDGCRWCSGRASALGGGRQDSRLRERGGGYDH/H |
| | | | | CPICRSLKIQLKCHPASGPQTVGLGRLASVS |
| 850 | A | 108 | 440 | MQATSNLLNLLLLSLFAGLNPSKTHINPKEGWQVYSSAQDPDGR |
| | | | | GICTVVAPEQNLCSRDAKSRQLRQLLEKVQNMSQSIEVLNLRTQ |
| | | | | RDFQYVLKMETQMKGLKAKFRQI |
| 851 | A | 108 | 440 | MQATSNLLNLLLLSLFAGLNPSKTHINPKEGWQVYSSAQDPDGR |
| | | | | GICTVVAPEQNLCSRDAKSRQLRQLLEKVQNMSQSIEVLNLRTQ |
| | | | | RDFQYVLKMETQMKGLKAKFRQI |
| 852 | A | 112 | 861 | QSQLCAGNSGPALGVGGPGCPKSAETHARSSPVATGSRVGGRRA |
| | | | | PCGPGMTSQRSPLAPLLLLSLHGVAASLEVSESPGSIQVARGQT |
| | | | | SSLACTFTTSAALINLNVIWMVTPLSNANQPEQVILYQGGQMFD |
| | | | | GAPRFHGRVGFTGTMPATNVSIFINNTQLSDTGTYQCLVNNLPD |
| | | | | IGGRNIGVTGLTVLVPPSAPHCQIQGSQDIGSDVILLCSSEEGI |
| | | | | PRPTYLWEKLDNTLKLPPTATQDLGDDLEQ |
| 853 | A | 1 | 247 | IEDDGEIISDVLKIPVQLVFKNKIKLYWSKVKAEPSEKVSLRIS |
| | | | | VTQPDSIVGIVAVDKSVNLMNASNDITMENVSLAIFSL |
| 854 | A | 2 | 640 | VVAVEYALSNYLFAAVGNPKDLFEVCLMAQDLDTAASYLIILQN |
| | | | | MEVPAVSRQHATLLFNTALEQGKWDLCRHMIRFLKAIGSGESET |
| | | | | PPSTPTAQEPSSSGGFEFFRNRSISLSQSAENVPASKFSLQKTL |
| | | | | SMPSGPSGKRWSKDSDCAENMYIDMMLWRHARRLLEDVRLKDLG |
| | | | | CFAAQLGFELISWLCKERTRAARVDNFVIALKRLHKD |
| 855 | A | 1 | 1326 | RTRMFLEEKIPSISDLKLAIRRATLKRSFTPVFLGSALKNKGVQ |
| | | | | PLLDAVLEYLPNPSEVQNYAILNKEDDSKEKTKILMNSSRDNSH |
| | | | | PFVGLAFKLEVGRFGQLTYVRSYQGELKKGDTIYNTRTRKKVRL |
| | | | | QRLARMHADMMEDVEEVYAGDICALFGIDCASGDTFTDKANSGL |
| | | | | SMESIHVPDPVISIAMKPSNKNDLEKFSKGIGRFTREDPTFKVY |
| | | | | FDTE/RQRDSYIWNGRITP\EIYAQRLEREYGCPCITGK/TKSC/ |
| | | | | RFERPLLPLSRLTLHIKNNQVVQAS/MGKVIGVLEPLDPEGL\ |
| | | | | PKLEFSDETFGSNI\PKQFVPAVEKGFLDACEKGPLSGHKLSGL |
| | | | | RFVLQDGAHHMVDSNEISFIRAGEGALKQALANATLCIL\EPIM |
| | | | | AVEVVAPNEFQGTS/ILAGINRRHGVITGQDGVEDYFTLYADVS |
| 707 | A | 609 | 785 | LGLEHISSSGEKYYYNCRTEVSQWGKTPKSGLERGQRQKEANKM |
| | | | | AVNSFPKDRDYRREVMQATATSGFASGKSTSGDKPVSHSCTTPS |
| | | | | TSSASGLNPTSAPPTSASAGPCFSVFHSSPIP/TLTSGPKSS*T |
| | | | | IAVLLWKPRCSLIILMWT*SIINEVLTGDVTQASLQTIIHKCLT |
| | | | | AGPSVFKITSLISQAAQLSTQAQASNQSPMSLTSDASSPRIICF |
| | | | | SKE*GTPQT*\PVPIQTFGFSTPPVSSQPKVSTPVVKQGPVSQS |
| | | | | ATQQPVTADKQQGHEPVSPRSLQRSSSQRSPSPGPNHTSNSSNA |
| | | | | SNATVVPQNSSARSTCSLTP/VTSSTLQ*KSTTTIVEQKFHNGE |
| | | | | KPQRVAWKEDRDKKKQTRWQSTASQKIGITEER |
| | | | | SLGHWQSCFY |
| 856 | A | 673 | 122 | PQSPQTDQTAQGQQALAPPAGRSGQ*GRPGRRARLGPGERHS*A |
| | | | | PPPLSQLLLQTFPHLQALPSAHARPSGQPHADRGHSRSPSGTSA |
| | | | | PALSAGA*APARGPEQARCPQAGRVCHCPRGGRRGPESSG*RPE |
| | | | | APQASPEKGPLGFGPVPRTARTRAQASSRCQVAPRPEALCCPPP |
| | | | | KGGRHPSQ |
| 857 | A | 116 | 632 | WHWPTSTNPRGQHL*CSAS*PLLCGSTMTDGATGCTRAPSAQPS |
| | | | | SSSRQSGYRR*RRRRACTQTRASTPSR*APASASGRWP*CYASS |
| | | | | LRTGTTLTSTASTTVPWLCPLFCCCPSKQPAPPFPASQQQHMES |
| | | | | WRRQATPSRAATRALPSAKGHTGRLLTAAIYEGRPKPGQV |
| 858 | A | 2 | 476 | FVQHCPSLPLSTVLGASWALPWASGSHPPSRLPCRMPQLSLSWL |
| | | | | GLGPVAASPWLLLLLVGGSWLLARVLAWTYTFYDNCRRLQCFPQ |
| | | | | PPKQNWFWGHQGLVTPTEEGMKTLTQLVTTYPQGFKLWLGPTFP |
| | | | | LLILCHPDIIRPITSASAAVAPKDMI |
| 859 | A | 739 | 792 | ASFLLQMCP*GPVQSLSSEP*GSGGFCLPLKSAQGT*T/PQDTC |
| | | | | RQGHPGIPGNPGHNGLPGRDGRDGAKGDKGDAGEPGRPGSPGKD |
| | | | | GTSGEKGERGADGKVEAKGIKGDQGS\*GSPGKHGPKGLAGPMG |
| | | | | EKGLRGETGPQGQKGNKGDVGPTGPEGPRGNIGPLGPTGLPGPM |
| | | | | GPIGKPGPKGEAGPTGPQGEPGVRGIRGWKGDRGEKGKIGETLV |
| | | | | LPKSAFTVGLTVLSKFPSSDVPIKFDKIHIT |
| 860 | A | 739 | 792 | ASFLLQMCP*GPVQSLSSEP*GSGGFCLPLKSAQGT*T/PQDTC |
| | | | | RQGHPGIPGNPGHNGLPGRDGRDGAKGDKGDAGEPGRPGSPGKD |
| | | | | GTSGEKGERGADGKVEAKGIKGDQGS\*GSPGKHGPKGLAGPMG |
| | | | | EKGLRGETGPQGQKGNKGDVGPTGPEGPRGNIGPLGPTGLPGPM |
| | | | | GPIGKPGPKGEAGPTGPQGEPGVRGIRGWKGDRGEKGKIGETLV |
| | | | | LPKSAFTVGLTVLSKFPSSDVPIKFDKIHIT |
| 861 | A | 739 | 792 | ASFLLQMCP*GPVQSLSSEP*GSGGFCLPLKSAQGT*T/PQDTC |
| | | | | RQGHPGIPGNPGHNGLPGRDGRDGAKGDKGDAGEPGRPGSPGKD |
| | | | | GTSGEKGERGADGKVEAKGIKGDQGS\*GSPGKHGPKGLAGPMG |
| | | | | EKGLRGETGPQGQKGNKGDVGPTGPEGPRGNIGPLGPTGLPGPM |
| | | | | GPIGKPGPKGEAGPTGPQGEPGVRGIRGWKGDRGEKGKIGETLV |
| | | | | LPKSAFTVGLTVLSKFPSSDVPIKFDKIHIT |
| 862 | A | 739 | 792 | ASFLLQMCP*GPVQSLSSEP*GSGGFCLPLKSAQGT*T/PQDTC |
| | | | | RQGHPGIPGNPGHNGLPGRDGRDGAKGDKGDAGEPGRPGSPGKD |
| | | | | GTSGEKGERGADGKVEAKGIKGDQGS\*GSPGKHGPKGLAGPNG |
| | | | | EKGLRGETGPQGQKGNKGDVGPTGPEGPRGNIGPLGPTGLPGPM |
| | | | | GPIGKPGPKGEAGPTGPQGEPGVRGIRGWKGDRGEKGKIGETLV |
| | | | | LPKSAFTVGLTVLSKFPSSDVPIKFDKIHIT |
| 707 | A | 609 | 785 | LGLEHISSSGEKYYYNCRTEVSQWGKTPKSGLERGQRQKEANKM |
| | | | | AVNSFPKDRDYRREVMQATATSGFASGKSTSGDKPVSHSCTTPS |
| | | | | TSSASGLNPTSAPPTSASAGPCFSVFHSSPIP/TLTSGPKSS*T |
| | | | | IAVLLWKPRCSLIILMWT*SIINEVLTGDVTQASLQTIIHKCLT |
| | | | | AGPSVFKITSLISQAAQLSTQAQASNQSPMSLTSDASSPRIICF |
| | | | | SKE*GTPQT*\PVPIQTFGFSTPPVSSQPKVSTPVVKQGPVSQS |
| | | | | ATQQPVTADKQQGHEPVSPRSLQRSSSQRSPSPGPNHTSNSSNA |
| | | | | SNATVVPQNSSARSTCSLTP/VTSSTLQ*KSTTTIVEQKFHNGE |
| | | | | KPQRVAWKEDRDKKKQTRWQSTASQKIGITEER |
| 863 | A | 2 | 394 | SFKYPTGIFTRFFLLPNSIIKAGFGTKGFFLEDKKTKIASTKIC |
| | | | | NNKILWLICSEFMSLWAGSNKKNMNQSRMDVYMSHAPTGSSVHN |
| | | | | ILHIKQLYHSDEFRAYDWGNDADNMKHYNQSHPPIYDLTAMKV |
| 864 | A | 1 | 1692 | FRGEAERMAL*QPGRSPRVPTPRPGRWARRDGVHSLPSQFEPER |
| | | | | RGRGRRDSEPGTRGRPGRHAESTNLL*GRMENEESDVKPPDWPN |
| | | | | PMNATSQSPQPQHFDSFGLRLPRDITELPEWSEGYPFYMAMGFP |
| | | | | GYDLSADDIAGKFQFSRGMRRTYDAGFKLMVVEYAESTNNCQAA |
| | | | | KQFGVLEKNVRDWRKVKPQLQNAHAMRRAFRGPKNGRFALVDQR |
| | | | | VAEYVRYMQAKGDPITREAMQLKALEIAQEMNIPEKGFKASLGW |
| | | | | CRRMMRRYDLSLRHKVPVPQHLPEDLTEKLVTYQRSVLALRRAH |
| | | | | DYEVAQMGNADETPICLEVPSRVTVDNQGEKPVLVKTPGREKLK |
| | | | | ITALLGVLADGRKLPPYIILRGTYIPPGKFPSGMEIRCHRYGWM |
| | | | | TEDLMQDWLEVVWRRRTGAVPKQRGMLILNGFRGHATDSVKNSM |
| | | | | ESMNTDMVIIPGGLTSQLQVLDVVVYKPLNDSVRAQYSNWLLAG |
| | | | | NLALSPTGNAKKPPLGLFLEWVMVAWNSISSESIVQGFKKCHIS |
| | | | | SNLEEEDDVLWEIESELPGGGEPPKDCDTESMAESN |
| 865 | A | 367 | 2 | MTWLVLLGTLLCMLRVGLGTPDSEGFPPRALHNCPYKCICAADL |
| | | | | LSCTGLGLQDVPAELPAGTADLDLSHNALQRMRPGWLAPLFQLR |
| | | | | ALHLDHNELHALDRGVFVNASGLRLLDLSSNAEF |
| 866 | B | 68 | 391 | MKSLVLLLCLAQLWGCHSAPHGPGLIYRQPNCDDPETEEYKEAR |
| | | | | LVLDSVKLEA |
| 867 | B | 68 | 391 | MKSLVLLLCLAQLWGCHSAPHGPGLIYRQPNCDDPETEEYKEAR |
| | | | | LVLDSVKLEA |
| 868 | B | 68 | 391 | MKSLVLLLCLAQLWGCHSAPHGPGLIYRQPNCDDPETEEYKEAR |
| | | | | LVLDSVKLEA |
| 869 | A | 17 | 1904 | GWGTSGSMSGCGLFLRTTAAARACRGLVVSTANRRLLRTSPPVR |
| | | | | AFAKELFLGKIKKKEVFPFPEVSQDELNEINQFLGPVEKFFTEE |
| | | | | VDSRKIDQEGKIPDETLEKLKSLGLFGLQVPEEYGGLGFSNTMY |
| | | | | SRLGETISMDGSITVTLAAHQAIGLKGIILAGTEEQKAKYLPKL |
| | | | | ASGEA\LAAFCLTEPANGSDAA*IRSRATLSEDKKHYILNGSKV |
| | | | | WITNGGLANIFTVFAKTEVVDSDGSVKDKITAFIVERDFGGVTN |
| | | | | GKPEDKLGIRGSNTCEVHFENTKIPVENILGEVGDGFKVAMNIL |
| | | | | NSGRFSMGSVVAGLLKRLIEMTAEYACTRKQFNKRLSEFGLIQE |
| | | | | KFALMAQKAYVMESMTYLTAGMLDQPGFPDCSIEAAMVKVFSSE |
| | | | | AAWQCVSEALQILGGLGYTRDYPYERILRDTRILLIFEGTNEIL |
| | | | | RMYIALTGLQHAGRILTTRIHELKQAKVSTVMDTVGRRLRDSLG |
| | | | | RTVDLGLTGNHGVVHPSLADSANKFEENTYCFGRTVETLLLRFG |
| | | | | KTIMEEQLVLKRVANILINLYGMTAVLSRASRSIRIGLRNHDHE |
| 707 | A | 609 | 785 | LGLEHISSSGEKYYYNCRTEVSQWGKTPKSGLERGQRQKEANKM |
| | | | | AVNSFPKDRDYRREVMQATATSGFASGKSTSGDKPVSHSCTTPS |
| | | | | TSSASGLNPTSAPPTSASAGPCFSVFHSSPIP/TLTSGPKSS*T |
| | | | | IAVLLWKPRCSLIILMWT*SIINEVLTGDVTQASLQTIIHKCLT |
| | | | | AGPSVFKITSLISQAAQLSTQAQASNQSPMSLTSDASSPRIICF |
| | | | | SKE*GTPQT*\PVPIQTFGFSTPPVSSQPKVSTPVVKQGPVSQS |
| | | | | ATQQPVTADKQQGHEPVSPRSLQRSSSQRSPSPGPNHTSNSSNA |
| | | | | SNATVVPQNSSARSTCSLTP/VTSSTLQ*KSTTTIVEQKFHNGE |
| | | | | KPQRVAWKEDRDKKKQTRWQSTASQKIGITEER |
| | | | | VLLANTFCVEAYLQNLFSLSQLDKYAPENLDEQIKKVSQQILEK |
| | | | | RAYICAHPLDRTC |
| 870 | A | 25 | 1396 | ADPHTTVIRFFPAASATKRVLPPVLRVSSPRTWNPNVPESPRIP |
| | | | | APRLPKRMSGAPTAGAALMLCAATAVLLSAQGGPVQSKSPRFAS |
| | | | | WDEMNVLAHGLLQLGQG\CANT\GAHPQSAERAGA\RLSACGSA |
| | | | | CQGTEGSTDLPLAPESRVDPEVLHSLQTQLKAQNSRIQQLFHKV |
| | | | | AQQQRHLEKQHLRIQHLQSQFGLLDHKHLDHEVAKPARRKRLPE |
| | | | | MAQPVDPAHNVSRLHRLPRDCQELFQVGERQSGLFEIQPQGSPP |
| | | | | FLVNCKMTSDGGWTVIQRRHDGSVDFNRPWEAYKAGFGDPHGEF |
| | | | | WLGLEKVHSITGDRNSRLAVQLRDWDGNAELLQFSVHLGGEDTA |
| | | | | YSLQLTAPVAGQLGATTVPPSGLSVPFSTWDQDHDLRRDKNCAK |
| | | | | SLSGGWWFGTCSHSNLNGQYFRSIPQQRQKLKKGIFWKTWRGRY |
| | | | | YPLQATTMLIQPMAAEAAS |
| 871 | A | 1 | 1140 | TARTGSELPGRATRPMVRMVPVLLSLLLLLGPAVPQENQDGRYS |
| | | | | LTYIYTGL\SKHVEDVPAFQALGSLNDLQFFRYNSTD\RKSQPM |
| | | | | GLW\RQVGREWEDWEARTSQLSGRPGGGTFFYGRPWKDIVGVIY |
| | | | | QRQ*TGSSRICRGRFGC\EIEINRSSGISWEF\YYDGKDYIEF\ |
| | | | | NK\EIPAW/VSPFDPAAQITKQKW\EAEPVYVQRA\KAYLEEEC |
| | | | | PATLRK\YLKYSKNIL\DRQ\DPPSV\VVTSHQGPRE/KKRRNL |
| | | | | KCLGLTTFYPRGKFDV\HWDFGAGRGCREP*VYGGDVL\HNGKW |
| | | | | AFYPVPGVVV/VQCPPAGTQPPLLPA\TCSTASPGPAPSWCPWG |
| | | | | GQARKQG\LEAMWDLQTQLACPFLALMLGS*THRNHSQWV\HKA |
| 872 | A | 80 | 403 | MLWFSGVGALAERYCRRSPGITCCVLLLLNCSGVPMSLASSFLT |
| | | | | GSVAKCENEGEVLQIPFITDNPCIMCVCLNKEVTCKREKCPVLS |
| | | | | RDCALAIKQRGACCEQCKGC |
| 873 | A | 46 | 594 | SPGPALFSQPLGSCSAKAFPAMRPVSVWQWSPWGLLLCLLCSSC |
| | | | | LGSPSPSTGPEKKAGSQGLRFRLAGFPRKPYEGRVEIQRAGEWG |
| | | | | TICDDDFTLQAAHILCRELGFTEATGWTHSAKYGPGTGRIWLDN |
| | | | | LSCSGTEQSVTECASRGWGNSDCTHDEDAGVICKDQRLPGFSDS |
| | | | | NVIEVEH |
| 874 | A | 3 | 538 | LLYAQAGVQ*LNLSSLQPQPAGLKQSSHPSLPSSWDYRYSTPHP |
| | | | | ANFFVEMEFHHVAQAGLELLGSGDLPTSTSHSAGITGV\SHHAP |
| | | | | PRLISSEGSLLGHLLCLPMVFPLLCVFVLISSSLAGEEAAGLRV |
| | | | | QKLWPAVVLSHLPVCWFHCSGIWSEVIELKVGREGHVLPWQAHV |
| | | | | VEF |
| 875 | A | 993 | 848 | TRYATPLAPGPGHPFSCSRRMATHHTLWMGLALLGVLGDLQAAP |
| | | | | EAQVSVQPNFQQDKFLGRWFSAGLASNSSWLREKKAALSMCKSV |
| | | | | VAPATDGGLNLTSTFLRKNQCETRTMLLQPAGSLGSYSYRSPHW |
| 707 | A | 609 | 785 | LGLEHISSSGEKYYYNCRTEVSQWGKTPKSGLERGQRQKEANKM |
| | | | | AVNSFPKDRDYRREVMQATATSGFASGKSTSGDKPVSHSCTTPS |
| | | | | TSSASGLNPTSAPPTSASAGPCFSVFHSSPIP/TLTSGPKSS*T |
| | | | | IAVLLWKPRCSLIILMWT*SIINEVLTGDVTQASLQTIIHKCLT |
| | | | | AGPSVFKITSLISQAAQLSTQAQASNQSPMSLTSDASSPRIICF |
| | | | | SKE*GTPQT*\PVPIQTFGFSTPPVSSQPKVSTPVVKQGPVSQS |
| | | | | ATQQPVTADKQQGHEPVSPRSLQRSSSQRSPSPGPNHTSNSSNA |
| | | | | SNATVVPQNSSARSTCSLTP/VTSSTLQ*KSTTTIVEQKFHNGE |
| | | | | KPQRVAWKEDRDKKKQTRWQSTASQKIGITEER |
| | | | | GSTYSVSVVETDYDQYALLYSQGSKGPGEDFRMATLYSRTQTPR |
| | | | | AELKEKFTAFCKAQGFTEDTIVFLPQTDKCMTEQ |
| 876 | A | 2 | 1624 | WDFIPDNSKAAFQASTRVYFELDLTDPYTISALASCQLLPHGEN |
| | | | | LQDVLPHELYWRLKRHLDYVKLMMPSWMTPAQRGKGLYADYLFN |
| | | | | AIAGNWERKRPVWVMLMVNSLTERDVRFRGVPVLDLYLAQQAEK |
| | | | | MKKTTGAVEQVEEQCHPLNNGLNFSQVLFALNQTLLQQESVRAG |
| | | | | SLQASYTTEDLIKHYNCGDLSAVIFNHDTSQLPNFINTTLPPHE |
| | | | | QVTAQEIDSYFRQELIYKRNERMGKRVMALLRENEDKICFFAFG |
| | | | | AGHFLGNNTVHSTFLAGRQGLGGGPPHPPGRPIHSPAPQSPAPS |
| | | | | PEGTSTSPAPVTPAAAVPEAPSVTPTAPPEDEDPALSPHLLLPD |
| | | | | SLSQLEEFGRQRKWHKRQSTHQRPRQFNDLWVRIEDRARQRGSV |
| | | | | WTLELSQAGCVALGCPVCLLKLLVPFSIVLGKIDLKKSDLSPKA |
| | | | | SAQDEAADGDSAMCFLLSSTTASPPPLPLQPTHSSGTAKPPFQL |
| | | | | SDPATTAGPRQGPPAARHPPWAFSPPSPPTHRCLLPACIALGPP |
| | | | | DLGPPQVEKPEK |
| 877 | A | 2572 | 208 | QRNLFLKAFTDFLAFMVLFNYIIPVSMYVTVEMQKFLGSYFITW |
| | | | | DEDMFDEETGEGPLVNTSDLNEELGQVEYIFTDKTGTLTENNME |
| | | | | FKECCIEGHVYVPHVICNGQVLPESSGIDMIDSSPSVNGREREE |
| | | | | LFFRALCLCHTVQVKDDDSVDGPRKSPDGGKSCVYISSSPDEVA |
| | | | | LVEGVQRLGFTYLRLKDNYMEILNRENHIERFELLEILSFDSVR |
| | | | | RRMSVIVKSATGEIYLFCKGADSSIFPRVIEGKVDQIRARVERN |
| | | | | AVEGLRTLCVAYKRLIQEEYEGICKLLQAAKVALQDREKKLAEA |
| | | | | YEQIEKDLTLLGATAVEDRLQEKAADTIEALQKAGIKVWVLTGD |
| | | | | KMETAAATCYACKLFRRNTQLLELTTKRIEEQSLHDVLFELSKT |
| | | | | VLRHSGSLTRDNLSGLSADMQDYGLIIDGAALSLIMKPREDGSS |
| | | | | GNYRELFLEICRSCSAVLCCRMAPLQKAQIVKLIKFSKEHPITL |
| | | | | AIGDGANDVSMILEAHVGIGVIGKEGRQAARNSDYAIPKFKHLK |
| | | | | KMLLVHGHFYYIRISELVQYFFYKNVCFIFPQFLYQFFCGFSQQ |
| | | | | TLYDTAYLTLYNISFTSLPILLYSLMEQHVGIDVLKRDPTLYRD |
| | | | | VAKNALLRWRVFIYWTLLGLFDALVFFFGAYFVFENTTVTSNGQ |
| | | | | IFGNWTFGTLVFTVMVFTVTLKLALDTHYWTWINHFVIWGSLLF |
| | | | | YVVFSLLWGGVIWPFLNYQRMYYVFIQMLSSGPAWLAIVLLVTI |
| | | | | SLLPDVLKKVLCRQLWPTATERVQVRSVPSRGGGASGPWP |
| 878 | A | 2887 | 3537 | HLDRSGLFNIQVIPVCRKLGKEGNDEKQCVTTSRSNAAFFLLHF |
| | | | | FLLATFTWMGLEAIHMYIALVKVFNTYIRRYILKFCIIGWGKPL |
| | | | | KIFLVLFFPHENCQVYGKESYGKEKGDEL*VIKTFCDE*ISFVS* |
| | | | | SGVMFFLNIAMFIVVMVQICGRNGKRSNRTLREEVLRNLRSVV |
| | | | | SLTFLLGMTWGFAFFAWGPLNIPFMYLFSIFNSLQGKINCT |
| 707 | A | 609 | 785 | LGLEHISSSGEKYYYNCRTEVSQWGKTPKSGLERGQRQKEANKM |
| | | | | AVNSFPKDRDYRREVMQATATSGFASGKSTSGDKPVSHSCTTPS |
| | | | | TSSASGLNPTSAPPTSASAGPCFSVFHSSPIP/TLTSGPKSS*T |
| | | | | IAVLLWKPRCSLIILMWT*SIINEVLTGDVTQASLQTIIHKCLT |
| | | | | AGPSVFKITSLISQAAQLSTQAQASNQSPMSLTSDASSPRIICF |
| | | | | SKE*GTPQT*\PVPIQTFGFSTPPVSSQPKVSTPVVKQGPVSQS |
| | | | | ATQQPVTADKQQGHEPVSPRSLQRSSSQRSPSPGPNHTSNSSNA |
| | | | | SNATVVPQNSSARSTCSLTP/VTSSTLQ*KSTTTIVEQKFHNGE |
| | | | | KPQRVAWKEDRDKKKQTRWQSTASQKIGITEER |
| 879 | A | 1 | 369 | QMIDSQNSKETKSHKALSDLELVAQSIIIIFAAYDTTSTTLPFI |
| | | | | MYELATHPDVQQKLQEEIDAVLANKAPVTYDALVQMEYLDMVVN |
| | | | | ETLRLFPVVSRVTRVCKKDIEINGVFIPKGLAVMV |
| 880 | A | 335 | 1105 | MKRERGALSRASRALRLAPFVYLLLIQTDPLEGVNITSPVRLIH |
| | | | | GTVGKSALLSVQYSSTSSDRPVVKWQLKRDKPVTVVQSIGTEVI |
| | | | | GTLRPDYRDRIRLFENGSLLLSDLQLADEGTYEVEISITDDTFT |
| | | | | GEKTINLTVDVPISRPQVLGASTTVLELSEAFTLNCSHENGTKP |
| | | | | SYTWLKDGKPLLNDSRMLLSPDQKVLTITRVLMEDDDLYSCVVE |
| | | | | NPINQGRTLPCKITEYRKSSLSSIWLQEAFSSLGPW* |
| 881 | A | 3818 | 65 | RLRLLLLESVSGLLQPRTGSAVAPVHPPNRSAPHLPGLMCLLRL |
| | | | | HGSVGGAQNLSALGALVSLSNARLSSIKTRFEGLCLLSLLVGES |
| | | | | PTELFQQHCVSWLRSIQQVLQTQDPPATMELAVAVLRDLLRYAA |
| | | | | QLPALFRDISMNHLPGLLTSLLGLRPECEQSALEGMKACMTYFP |
| | | | | RACGSLKGKLASFFLSRVDALSPQLQQLACECYSRLPSLGAGFS |
| | | | | QGLKHTESWEQELHSLLASLHTLLGALYEGAETAPVQNEGPGVE |
| | | | | MLLSSEDGDAHVLLQLRQRFSGLARCLGLMLSSEFGAPVSVPVQ |
| | | | | EILDFICRTLSVSSKNIVSGICHLFRALAQDTRQPGKYWGPESP |
| | | | | QTVSSWSPSQRASTFVQITSLPMCRDTGAQCQSVANASLGEGEF |
| | | | | GDSAESLLRGPAILLTFHPGSILEDRGLILLGEMRSGVGFLTYV |
| | | | | YICKWSFPVSVSLWLSLSSSTLYLCPFFLQSLHGDGPCGCCCCP |
| | | | | LSTLKALDLLSALILACGSRLLRFGILIGRLLPQVLNSWSIGRD |
| | | | | SLSPGQERPYSTVRTKVYAILELWVQVCGASAGMLQGGASGEAL |
| | | | | LTHLLSDISPPADALKLRSPRGSPDGSLQTGKPSAPKKLKLDVG |
| | | | | EAMAPPSHRKGDSNANSDVCAAALRGLSRTILMCGPLIKEETHR |
| | | | | RLHDLVLPLVMGVQQGEVLGSSPYTSSRCRRELYCLLLALLLAP |
| | | | | SPRCP\LLLPVPCKPSPSASEKIALRSPLSCSEALVTCAALTHP |
| | | | | RVPPLQPMGPTCPTPAPVPLLRPHRPSGPHRSILRAPCPQWAPC |
| | | | | PQQAPCPSAGPMPSAGPVPSEPWTSTTANLLGLLSRPSVCPPRL |
| | | | | LPGPENHRAGSNEDPILAPSGTPPPTIPPDETFGGRVPRPAFVH |
| | | | | YDKEEASDVEISLESDSDDSVVIVPEGLPPLPPPPPSGATPPPI |
| | | | | APTGPPTASPPVPAKEEPEELPAAPGPLPPPPPPPPPVPGPVTL |
| | | | | PPPQLVPEGTPGGGGPPALEEDLTVININSSDEEEEEEEEEEEE |
| | | | | EEEEEEEEEDFEEEEEEEDFEEEEEDEEEYFEEEEEEEEEFEEE |
| | | | | FEEEEGELEEEEEEEDEEEEEELEEVEDLEFGTAGGEVEEGAPP |
| | | | | PSTLPPALPPPESPPKVQPEPEPEPGLLLEVEEPGTEEERGADT |
| | | | | APTLAPEALPSQGEVEREGESPAAGPPPQELVEEEPSAPPTLLE |
| | | | | EETEDGSDKVQPPPETPAEEEMETETEAEALQEKEQDDTAAMLA |
| | | | | DFIDCPPDDEKPPPPSEPDS |
| 707 | A | 609 | 785 | LGLEHISSSGEKYYYNCRTEVSQWGKTPKSGLERGQRQKEANKM |
| | | | | AVNSFPKDRDYRREVMQATATSGFASGKSTSGDKPVSHSCTTPS |
| | | | | TSSASGLNPTSAPPTSASAGPCFSVFHSSPIP/TLTSGPKSS*T |
| | | | | IAVLLWKPRCSLIILMWT*SIINEVLTGDVTQASLQTIIHKCLT |
| | | | | AGPSVFKITSLISQAAQLSTQAQASNQSPMSLTSDASSPRIICF |
| | | | | SKE*GTPQT*\PVPIQTFGFSTPPVSSQPKVSTPVVKQGPVSQS |
| | | | | ATQQPVTADKQQGHEPVSPRSLQRSSSQRSPSPGPNHTSNSSNA |
| | | | | SNATVVPQNSSARSTCSLTP/VTSSTLQ*KSTTTIVEQKFHNGE |
| | | | | KPQRVAWKEDRDKKKQTRWQSTASQKIGITEER |
| 882 | A | 311 | 790 | YTMLRGTMTAWRGMRPEVTLACLLLATAGCFADLNEVPQVTVQP |
| | | | | ASTVQKPGGTVILGCVVEPPRMNVTWRLNGKELNGSDDALGVLI |
| | | | | THGTLVITALNNHTVGRYQCVARMPAGAVASVPATVTLASESAP |
| | | | | LPPCHGAVPPHLSHPEAPTIHAASCYS |
| 883 | A | 54 | 419 | ITPLGLGAADMCAFPWLLLLLLLQEGSQRRLWRWCGSEEVVAVL |
| | | | | QESISLPLEIPPDEEVENIIWSSHKSLATVVPGKEGHPATIMVT |
| | | | | NPHYQGQILTMLLRSLQQPSASWPRDCSSSCSW |
| 884 | A | 240 | 461 | GLVFSRLSPEYYDLARAHLRDEEKSCPCLAQEGPQGDLLTKTQE |
| | | | | LGRDYRTCLTIVQKLKKMVDKPTQRSVSNA |
| 885 | A | 167 | 919 | SAAGWASPLRPRCGVPRGCSWPSPCTQRCRCPRAGTTACWALGP |
| | | | | RACRWPTSCSALDATTQCSSGPRGPAASSHATRGTASSSASTSG |
| | | | | TPARLTPSSTSATTGTLCSATTPGCSSDTTRVPTSPTPATWCAT |
| | | | | WVTSRTRWGSVSSTTPPSPTSLWTRTDRPGMATTSRD*AIFPLS |
| | | | | PPAASSL*PLVYQSPTRLTSLAPNMQRVTSPCPWTLRTL*ARMC* |
| | | | | SWVVGTRPLRQQRTSWVSQTLSICSAAPGS |
| 886 | A | 2049 | 730 | RAPARQGPGPARLPGMVSKALLRLVSAVNRRRMKLLLGIALLAY |
| | | | | VASVWGNFVNMSFLLNRSIQENGELKIESKIEEVEPLREKIRD |
| | | | | LEKSFTQKYPPVKFLSEKDRKRILITGGAGFVGSHLTDKLMMDG |
| | | | | HEVTVVDNFFTGRKRNVEHWIGHENFELINHDVVEPLYIEVDQI |
| | | | | YHLASPASPPNYMYNPIKTLKTNTIGTLNMLGLAKRVGARLLLA |
| | | | | STSEVYGDPEVHBQSEDYWGHVNPIGPRACYDEGKRVAETMCYA |
| | | | | YMKQEGVEVRVARIFNTFGPRMHMNDGRVVSNFILQALQGEPLT |
| | | | | VYGSGSQTRAFQYVSDLVNGLVALMNSNVSSPVNLGNPEEHTIL |
| | | | | EFAQLIKNLVGSGSEIQFLSEAQDDPQKRKPDIKKAKLMLGWEP |
| | | | | VVPLEEGLNKAIHYFRKELEYQANNQYIPKPKPARIKKGRTRHS |
| 887 | A | 203 | 1772 | HLFLEFSVTQQEVQFKPESLCKKLFSDHKELEGLMKTLIHPCSQ |
| | | | | GIVIFSRSWAGDVGFRKEQNVLWDALLIAVNSPVVLYTILIDPN |
| | | | | WPGGLEYARNTAHQLKQKLQTVGGYTGKVCIIPRLIHLSSTQSR |
| | | | | PGEIPLRYPRSYRLADEEEMEDLLQALVVVSLSSRSLLSDQMGC |
| | | | | EFFNLLIMEQSQLLSESLQKTRELFIYCFPGVRKTALAIKIMEK |
| | | | | IKDLFHCKPKEILYVCESDSLKDFVTQQTTCQAVTRKTFMQGEF |
| | | | | LKIKHIVMDETENFCSKYGNWYMKAKNITHPKAKGTGSENLHHG |
| | | | | ILWLFLDPFQIHHADVNGLPPPSAQFPRKTITSGIHCALEIAKV |
| | | | | MKEEMKRIKENPPSNMSPDTLALFSETAYEEATCAQALPGVCET |
| | | | | KTNLTTEQIANYVARKCHSLFQCGYLPKDIAILCRRGEDRGRYR |
| | | | | LALLKAMELIETHRPSEVVFSPATGVWGSHIVLDSIQQFSGLER |
| | | | | TVVFGLSPECDQSEEFHKLCFASRAIKHLYLLYEKRAAY |
| 888 | A | 79 | 480 | PAGIRRSIAKQTGHPGSWETGLWIFRDAAIEFSPEEWSYLDPAQ |
| 707 | A | 609 | 785 | LGLEHISSSGEKYYYNCRTEVSQWGKTPKSGLERGQRQKEANKM |
| | | | | AVNSFPKDRDYRREVMQATATSGFASGKSTSGDKPVSHSCTTPS |
| | | | | TSSASGLNPTSAPPTSASAGPCFSVFHSSPIP/TLTSGPKSS*T |
| | | | | IAVLLWKPRCSLIILMWT*SIINEVLTGDVTQASLQTIIHKCLT |
| | | | | AGPSVFKITSLISQAAQLSTQAQASNQSPMSLTSDASSPRIICF |
| | | | | SKE*GTPQT*\PVPIQTFGFSTPPVSSQPKVSTPVVKQGPVSQS |
| | | | | ATQQPVTADKQQGHEPVSPRSLQRSSSQRSPSPGPNHTSNSSNA |
| | | | | SNATVVPQNSSARSTCSLTP/VTSSTLQ*KSTTTIVEQKFHNGE |
| | | | | KPQRVAWKEDRDKKKQTRWQSTASQKIGITEER |
| | | | | QNLYRDGMLENYRNLVSLGIAVSKPDLITCLEQPRNEPWNVKKHE |
| | | | | TVARHPAVSSHFTQDLLPEHGIKDSFQKVILRRYGSYGIENLQL |
| | | | | KK |
| 889 | A | 523 | 989 | GARRQAHTMALKRINKELSDLARDPPAQCSAGPVGDDMFHWQAT |
| | | | | IMGPNDSPYQGGVFFLTIHFPTDYPFKPPKVAFTTRIYHPNINS |
| | | | | NGSICLDILRSQWSPALTISKVLLSICSLLCDPNPDDPLVPEIA |
| | | | | RIYKTDRDKYNRISREWTQKYAM |
| 890 | A | 310 | 2 | LVCFFSVLMGPFYPPVSPERSVAQSEAREGRGPRGLPPLSLPRG |
| | | | | PFGARAHRVGRPGSSVPHSPPSRGRGRKNPASARQQQRLAGNGA |
| | | | | QEGRQRLAASKSTP |
| 891 | A | 2280 | 3000 | EAWCSWVWDFTRAYSGAPIFLLHMGSAPLPSRAEGKSLARVPNA |
| | | | | TGLRMAFCLEASLGPDFCCWYQSPETLPPWSPCNAQLVSYCFSK |
| | | | | PLKASTSPLSPGQDCGEASQPLLS*LPLSCPTLGCPFPSFPSKG |
| | | | | FHGPPSVGSGPARSRLGSSSCF*ATTLGKLNVPSTLSPFPRTNH |
| | | | | FCAHPWRRDELLAEGQSKCKSWSAGRGVHGFPSPGRVSVSFILS |
| | | | | PLTGYGFRAMPRAPLCSPA |
| 892 | A | 355 | 861 | PLTTTPAAPRAPCPPSRLSGQPLTGPTEGSRSRLSPNISEQGEP |
| | | | | PLALTVGHPLSTQPGPTVPSELEPIQGPRG*GDCPTPSQSA*GG |
| | | | | VLSCTPESHTEFKPPPTGGGRRWARLGLNGAT*GREEPLQTRLP |
| | | | | AEYPGPGPIDPLQPPPISTASMATAFSDFLLLGRDPA |
| 893 | A | 15 | 800 | FSDLTAHFLFHSGEKPYECKECGKVFRYKSSLTSHHRIHTGEKP |
| | | | | YKCNRCGKVFSRSSNLVCHQKIHTGEKPYKCNQCGKVFNQASYL |
| | | | | TRHQIIHTGERPYRCSKCGKAFRGCSGLTAHLAIHTEKKSHECK |
| | | | | ECGKIFTQKSSLTNHHRIHIGEKPYKCTLCSKVFSHNSDLAQHQ |
| | | | | RVHS*ESLQTVYGKTIIMSSSINQHQ*VHTKWKSYK*NVCDTGF |
| | | | | IKACQITGHHHITVEDESTQMNCVYLGYYSRTIAIEHDRIYT |
| 894 | A | 6222 | 7046 | RTVTTFLSKDSHGVYCAQGGKIPDHQNPQCNRKQHPVSTILMLD |
| | | | | KASFCQLRKRKHNLSVNCINRNPFMSLKNTSWHSSLSVTQRHQQ |
| | | | | QSKLHFQGSILLH*PSQNIL/SNI*KCINYC*HCSSVLLSYLFI |
| | | | | ETESYSVAQAGVQWHDLGLLQLLPLRFKQFSCFSLPSSWDYRSA |
| | | | | PSCPANFCILVEMGFCHVGQAGLKLLASSDPPALASQSAGITGV |
| | | | | SHYTQPCSPFLKSTGLFSCKVLSNPYHKGRIYLGRMCFLNSTWH |
| | | | | LVKSTLFCPLFI |
| 895 | A | 246 | 717 | KRQSEEGVFSCCQGWNESLLLKSKVLEYP*FLHFPSFSFDLYLF |
| | | | | NYVFIYLFIYFCSIQSQTQSKAERAYIYIYLYMCCRQNTVNFTT |
| | | | | TTTKQLFCHLNIHLRRRNEKRWGCHFLVYAFEARSMFIYFFSLC |
| | | | | INENDPEWRLAERSMYWSKHHKSC |
| 896 | A | 3 | 1007 | AWHEGLVSSPAIGAYLSASYGDSLVVLVATVVALLDICFILVAV |
| 707 | A | 609 | 785 | LGLEHISSSGEKYYYNCRTEVSQWGKTPKSGLERGQRQKEANKM |
| | | | | AVNSFPKDRDYRREVMQATATSGFASGKSTSGDKPVSHSCTTPS |
| | | | | TSSASGLNPTSAPPTSASAGPCFSVFHSSPIP/TLTSGPKSS*T |
| | | | | IAVLLWKPRCSLIILMWT*SIINEVLTGDVTQASLQTIIHKCLT |
| | | | | AGPSVFKITSLISQAAQLSTQAQASNQSPMSLTSDASSPRIICF |
| | | | | SKE*GTPQT*\PVPIQTFGFSTPPVSSQPKVSTPVVKQGPVSQS |
| | | | | ATQQPVTADKQQGHEPVSPRSLQRSSSQRSPSPGPNHTSNSSNA |
| | | | | SNATVVPQNSSARSTCSLTP/VTSSTLQ*KSTTTIVEQKFHNGE |
| | | | | KPQRVAWKEDRDKKKQTRWQSTASQKIGITEER |
| | | | | PESLPEKMRPVSWGAQISWKQADPFASLKKVGKDSTVLL\ICIT |
| | | | | VCLSYLPEAG\QYSSFF\LYLR\QVIGFG\TVKIAAFIAMVGIL |
| | | | | SIVAQTAFLSILMRSLGNKNTVLLGLGFQMLQLAWYGFGSQAWM |
| | | | | MWAAGTVAAMSSITFPAISALVSRNAESDQQGVAQGIITGIRGL |
| | | | | CNGLGPALYGFIFYMFHVELTETGPKLNSNNVPLQGAVIPGPPF |
| | | | | LFGACIVLMSFLAALFIPEYSKASGVQKHSNSSSGSLTNTPERG |
| | | | | SDEDIEPLLQDSSIWELSSFEEPGNQCTEL |
| 897 | A | 953 | 614 | TPIRGTDDEHEECTVQEYSAGKNTCLRPGAVAHTCNPCTLGGRG |
| | | | | RWIT*GSGVQDQPGPTWQNPVFLERRPRALHSSPGLTTQRILWA |
| | | | | QGLWVGAGSTGCSRGPRGEGVFREG |
| 898 | A | 1 | 412 | FFFFECG*SFTNSFSVTIHRRIHNGEKSYECSDCGKSFNVLSSV |
| | | | | KKHMRTHTGKKPYECNYCGKSFTSNSYLSVHTRMHNRQM*IQ*L/ |
| | | | | CGKAFIDLSCLR*HEQTLTRCMNHLLLCNKLPPKILWLQTKTL |
| | | | | VISKFL |
| 899 | A | 2 | 2865 | ALPDGGASVASDRAEGRPAKPSKTAAREKTEGAVAAVGGGPSSF |
| | | | | RCCYGCCHEARLGRTSLPRGVIMLTEASLSIWGWGSLGIVLFLI |
| | | | | TFGPFVIFYLTFYILCFVGGGLVVTLLFGKTNSEKYLEQCEHSF |
| | | | | LPPTSPGVPKCLEEMKREARTIKIDRRLTGANIIDEPLQQVIQF |
| | | | | SLRDYVQYWYYTLSDDESFLLEIRQTLQNALIQFATRSKEIDWQ |
| | | | | PYFTTRIVDDFGTHLRVFRKAQQKITEKDDQVKGTAEDLVDTFF |
| | | | | EVEVEMEKEVCRDLVCTSPKDEEGFLRDLCEVLLYLLLPPGDFQ |
| | | | | NKIMRYFVREILARGILLPLINQLSDPDYINQYVIWMIRDSNCN |
| | | | | YEAFMNIIKLSDNIGELEAVRDKAAEELQYLRSLDTAGDDINTI |
| | | | | KNQINSLLFVKKVCDSRIQRLQSGKEINTVKLAANFGKLCTVPL |
| | | | | DSILVDNVALQFFMDYMQQTGGQAHLFFWMTVEGYRVTAQQQLE |
| | | | | VLLSRQRDGKHQTNQTKGLLRAAAVGIYEQYLSEKASPRVTVDD |
| | | | | YLVAKLADTLNHEDPTPEIFDDIQRKVYELMLRDERFYPSFRQN |
| | | | | ALYVRMLAELDMLKDPSFRGSDDGDGESFNGSPTGSINLSLDDL |
| | | | | SNVSSDDSVQLHAYISDTVYADYDPYAVAGVCNDHGKTYALYAI |
| | | | | TVHRRNLNSEEMWKTYRRYSDFHDFHMRITEQFESLSSILKLPE |
| | | | | KKTFNNMDRDFLEKRKKDLNAYLQLLLAPEMMKASPALAHYVYD |
| | | | | FLENKAYSKGKGDFARKMDTFVNPLRNSMRNVSNAVKSLPDSLA |
| | | | | EGMTKMSDNMGKMSERLGQDIKQSFFKVPPLIPKTDSDPEHRRV |
| | | | | SAQLDDNVDDNIPLRVMLLLMDEVFDLKERNQWLRRNIKNLLQQ |
| | | | | LIRATYGDTINRKIVDHVDWMTSPEQVADSVKRFRDAFWPNGIL |
| | | | | AEAVPCRDKSIRMRTRVAGKTKLLAIMPGE |
| 900 | A | 305 | 592 | MGSLLCSCSQRECISIHVGQAGVQIGNACWELYCLEHGIQPDGQ |
| | | | | MPSDKPIGGGDDSFNTFFSETGAGKHVPRAVFVDLEPTVVGRCL |
| 707 | A | 609 | 785 | LGLEHISSSGEKYYYNCRTEVSQWGKTPKSGLERGQRQKEANKM |
| | | | | AVNSFPKDRDYRREVMQATATSGFASGKSTSGDKPVSHSCTTPS |
| | | | | TSSASGLNPTSAPPTSASAGPCFSVFHSSPIP/TLTSGPKSS*T |
| | | | | IAVLLWKPRCSLIILMWT*SIINEVLTGDVTQASLQTIIHKCLT |
| | | | | AGPSVFKITSLISQAAQLSTQAQASNQSPMSLTSDASSPRIICF |
| | | | | SKE*GTPQT*\PVPIQTFGFSTPPVSSQPKVSTPVVKQGPVSQS |
| | | | | ATQQPVTADKQQGHEPVSPRSLQRSSSQRSPSPGPNHTSNSSNA |
| | | | | SNATVVPQNSSARSTCSLTP/VTSSTLQ*KSTTTIVEQKFHNGE |
| | | | | KPQRVAWKEDRDKKKQTRWQSTASQKIGITEER |
| | | | | GTGWQLS |
| 901 | A | 60 | 388 | GLDSFSATETRRTHTNTEPHSQSQEPSNGEPQKEEPAAESRDPT |
| | | | | PGQQTEEDQDTAEIPVRDMEGDLQELASVKHRG*ILDLGS\SVK |
| | | | | VKIIPKEEHCKMPEAGEEQPQV |
| 902 | A | 1 | 885 | MSPTREAPYLTLYCTLSAYGSAWPMVGLSKYLQKEKFLNEHRED |
| | | | | FSNAFGLGEDKGGNFLRLSPPSSGRQGHHTRRAEALLGGAAGSN |
| | | | | PGKATSERAHLLSPGGAALVSEESNADKRVENWPLMQSPWPTLS |
| | | | | ISTLYLLFVWLGPKWMKDREPFQMRLVLIIYNFGMVLLNLFIFR |
| | | | | ELFMGSYNAGYSYICQSVDYSNNVHEVRIQFHVTIGHTALSLYT |
| | | | | DCPFPKWMHWALIAYAISFIFLFLNFYIRTYKEPKKPKAGKTAM |
| | | | | NGISANGVSKSEKQLMIENGKKQKNGKAKGD |
| 903 | A | 68 | 398 | GPASNRALGFVVLLETRMVSAVSDPPTSTTGSTMCECISIHVGQ |
| | | | | AGVQMGNACWELYCLEHDIQPSGTMPSHKALGSSDNSFNTFFRE |
| | | | | TQPGRHV\PGLSVDLEPAVIAQ |
| 904 | A | 3 | 416 | EKPYECSDCGKSFIKKSQLHVHQRIHTGENPFICSECGKVFTHK |
| | | | | TNLIIHQKIHTGERPYICTVCGKAFTDRSNLIKHQKIHTGEKPY |
| | | | | KCSDCGKSFTWKSRLRIHQKCHTGER/HYECSECGKAFIQKSTL |
| | | | | SMHQRIH |
| 905 | B | 373 | 389 | MPLEVVVELQIRAISCPGVFLPGKQDVYLGVYLMNQYLETNSFP |
| | | | | SAFPIMIQESMRFEKVFESAVDPGAVVDLLENGDPSKAETEAAG |
| | | | | HREEYIGTGRTTRSLAGAVGREPGLPSGPTPGENHLPAGSPIC |
| 906 | A | 832 | 1885 | AEWDAADKAHVGPGRSPRQPLPHVGRRRAAHTTGRGRRTAGCAP |
| | | | | APARTLCILSILGPWCVLPHLPTLCLGQAQAASCSQGAHGCFAG |
| | | | | CSCT/GTSASHPV/CCKCPLHPVCTLADVHGCITSGFSVISLPQ |
| | | | | TCAPWTSWRKWSLSDSWQVDACPESCCEPPCCATSCCAPAPCLT |
| | | | | LVCTPVSCVSSPCCQAACEPSPCQSGCTSSCTPSCCQQSSCQPA |
| | | | | CCTSSPCQQACCVPVCCKPVCCVPVCCKPVCCKPCCVPVCSGA |
| | | | | SSSCCQQSSRQPACCTTSCCRPSSSVSLLCRPVCRSTCCVPIPS |
| | | | | CCAPASTCQPSCCRPASCVSLLCRPTCSRLSSACCGLSSGQKSSC |
| 907 | A | 2 | 480 | RIPGRRFRAAFVLGSANVASSVRLRCSFPLSLGGPSGPAAASVA |
| | | | | LGPAGPGRSLGRTPDTGDWEMDSVSFEDVAVAFTQEEWALLDPS |
| | | | | QKNLYRDVMQEIFRNLASVGNKSEDQNQDDFKNPGRNLSSHVV |
| | | | | ERLFEIKEGSQYGETFSQDSNLNLNKI |
| 908 | A | 1970 | 1677 | FFLRRSFAVVAQAGVQWHDLNSPQPPPPGFKQFSCLSLPSS*DY |
| | | | | RRMPPRPANFVFLVEMGFLHVGQAGLKLPTSGDPPASASQSAGI |
| | | | | TGVSHRAQP |
| 909 | A | 1982 | 958 | RYFRSLAEGVRAAPRRREPRTMSVGFIGAGQLAYALARGFTAAG |
| 707 | A | 609 | 785 | LGLEHISSSGEKYYYNCRTEVSQWGKTPKSGLERGQRQKEANKM |
| | | | | AVNSFPKDRDYRREVMQATATSGFASGKSTSGDKPVSHSCTTPS |
| | | | | TSSASGLNPTSAPPTSASAGPCFSVFHSSPIP/TLTSGPKSS*T |
| | | | | IAVLLWKPRCSLIILMWT*SIINEVLTGDVTQASLQTIIHKCLT |
| | | | | AGPSVFKITSLISQAAQLSTQAQASNQSPMSLTSDASSPRIICF |
| | | | | SKE*GTPQT*\PVPIQTFGFSTPPVSSQPKVSTPVVKQGPVSQS |
| | | | | ATQQPVTADKQQGHEPVSPRSLQPRSSSQRSPSPGPNHTSNSSNA |
| | | | | SNATVVPQNSSARSTCSLTP/VTSSTLQ*KSTTTIVEQKFHNGE |
| | | | | KPQRVAWKEDRDKKKQTRWQSTASQKIGITEER |
| | | | | ILSAHKIIASSPEMNLPTVSALRKMGVNLTRSNKETVKHSDVLF |
| | | | | LAVKPHIIPFILDEIGADVQARHIVVSCAAGVTISSVEKKLMAF |
| | | | | QPAPKVIRCMTNTPVVVQEGATVYATGTHALVEDGQLLEQLMSS |
| | | | | VGFCTEVEEDLIDAVTGLSGSGPAYAFMALDALADGGVKMGLPR |
| | | | | RLAIQLGAQALLGAAKMLLDSEQHPCQLKDNVCSPGGATIHALH |
| | | | | FLESGGFRSLLINAVEASCIRTRELQSMADQEKISPAALKKTLL |
| | | | | DRVKLESPTVSTLTPSSPGKLLTRSLALGGKKD |
| 910 | A | 88 | 331 | QLCSCLRPDRPPLPARSAQSPMAAALRAPTQVFVAFEDVAIYFS |
| | | | | QEEWELLDEMQRLLYRDVMLENFAVMASLGIIECFQE |
| 911 | A | 429 | 2 | QDIAAWQSLTQVLTPESWRKANIMTEPQKSQERYKGIYVKEKLY |
| | | | | RRARHDESLNWTSCDHHESQECKGEDPGRHPNCGKNLGMKSTVE |
| | | | | QHHVVHVLPQPFTCNNCGVAFADDTDPRAHPSTHLGEKSYKCDQ |
| | | | | YGKILSQSLY |
| 912 | A | 1 | 415 | PIGTLFSVAEFLVEHQRSHTGEKPYECNDCGKVFSQSTHLIQHQ |
| | | | | RIHTGEKPYKCSECGKAFHNSSRLIHHQRLHHGEKPYRCSDCKK |
| | | | | AFSQSTYLIQHRRIHTGEKPYKCSECGKAFRHSSNMCQHQRIHL |
| | | | | REDFSM |
| 913 | A | 3 | 562 | SSCQAVCCDPSPCEPTCSESSICQPATCVALVCEPVCLRPVCCV |
| | | | | QSSCEPPSVPSTCQEPSCCVSSICQPICSEPSPCSPAVCVSSPC |
| | | | | QPTCYVVKRCRSVCPEPVSCPSTSCRPLSCSPGS\LHLPSRPTC |
| | | | | PRTFYIFSSSKRPCSATISYRPVSRPICRPICSGLLTYRQPYMT |
| | | | | SISYRPACYRP |
| 914 | A | 2 | 1028 | FFFLSQYISVYYNLPRLRDLARAAKTDSDRPSPPGACSQPGPKR |
| | | | | KQASEGTAECRVLATELQECALAPTRATVLPPPGLPGLRQQPPA |
| | | | | HGGSPPPGAARPSHRSAGPQALHLPGPPPAAAAALSPGAGGLLH |
| | | | | SSW*EAGPPPQKAPGGGTPSPPGPVAQVDTTHDSQHPLAGRNPR |
| | | | | APQRSPARPPLEAAGKAERGRQSSRTGVASGHGT*DQWMWCKGH |
| | | | | GHPAVRGPGIGAAEAGAEGGQGGQDTGRAHGQPPGVHTAVLPHG |
| | | | | SAAPESRWAPAPPAGASTLGVGP*PDGTPGSAVPGPVPPAPSVL |
| | | | | PQSPGSRPPVKRPVQVRQARGPGPPPTWVLPGVP |
| 915 | A | 1 | 1071 | MVQVIRKDAPTPRTREPSLSDKGICPKPQEALKFFCEVDEEAIC |
| | | | | VVCREFRSHKQHSVVPLEEVVQEYKELLESRLRVLKKELEDCEV |
| | | | | FRSTEKKESKELLRILLTNAHPHNLAVKLEHTGLDAHLDLLLST |
| | | | | HTFGYPKEDQRLWHAVAEATGLKAERTLFIDDSEAILDAAAQFG |
| | | | | DAMKEKPAVEVRLDKWLWAARFYKTRALAREMIEGGKVHYNGQR |
| | | | | SKPSKIVELNATLTLRQGNDERTVIVKAITEQRRPASTDRNRKP |
| | | | | QYLEIIDIWDLSTSSVKIDVLVDRNARLISVLLKFGVHTVEIQA |
| | | | | QSTGIIFQSRHPFMHPVTSPGTCRPSLNCLTGSPGTELECINSR |
| 707 | A | 609 | 785 | LGLEHISSSGEKYYYNCRTEVSQWGKTPKSGLERGQRQKEANKM |
| | | | | AVNSFPKDRDYRREVMQATATSGFASGKSTSGDKPVSHSCTTPS |
| | | | | TSSASGLNPTSAPPTSASAGPCFSVFHSSPIP/TLTSGPKSS*T |
| | | | | IAVLLWKPRCSLIILMWT*SIINEVLTGDVTQASLQTHKCLT |
| | | | | AGPSVFKITSLISQAAQLSTQAQASNQSPMSLTSDASSPRICF |
| | | | | SKE*GTPQT*\PVPIQTFGFSTPPVSSQPKVSTPVVKQGPVSQS |
| | | | | ATQQPVTADKQQGHEPVSPRSLQRSSSQRSPSPGPNHTSNSSNA |
| | | | | SNATVVPQNSSARSTCSLTP/VTSSTLQ*KSTTTIVEQKFHNGE |
| | | | | KPQRVAWKEDRDKKKQTRWQSTASQKIGITEER |
| | | | | VITGY |
| 916 | A | 1 | 432 | VLSCSPAPVAGPRGANPGEPRSGRDMDCVIFEEVAVNFTPEEWA |
| | | | | LLDHAQRSLYRDVMLETCRNLASLDCYIYVRTSGSSSQRDVFGN |
| | | | | GISNDEEIVKFTGSDSWSIFGENWRFDNTGDQHQIPQRHLRSQL |
| | | | | GRLCESMKVIMR |
| 917 | A | 1 | 703 | PAPLAEGAFLAEASLLKGLSPATPTSEGPKVVSVQLGDGTRLKGT |
| | | | | VLPVATIQNASTAMLMAASVARKAVVLPGGTATSPKMIAKNVLG |
| | | | | LVPQALPKADGRAGLGTGGQKVNGASVVMVQPSKTATGPSTGGG |
| | | | | TVISRTQSSLVEAFNKILNSKNLLPAYRPNLSPPAEAGLALPPT |
| | | | | GYRCLECGDAFSLEKSLARHYDRRSMRIEVTCNHCARRLVFFNK |
| | | | | CSLLLHAREHKDKG |
| 918 | A | 1389 | 211 | TGQGSGPMRAGSQSHQILSSPPSRMHAKDTPFPTHLIGAPKPLA |
| | | | | CCVDGGEARPAVLWPGEKKIKRRPCPWGRPLSGPPFPP\PNLPG |
| | | | | PRTPLPAPTPLEVSRPFLCHLVGQMA*WASAWGIE*GSP*PPEP\ |
| | | | | NPGPRCKQHPSRALPQYPQGIHTPPLLPQPRTDRLPGPEPN/R |
| | | | | PSASETHGGPHTPYILPH*GSPGPTGASGKPPKLATALGRALCP |
| | | | | PHHRPRSRVLVGALHPNPRSPWPPIFLGPIGACFSPAGWTP*RA |
| | | | | VPRGSPGGSRLGAYVVVSGPRLQPPAPTPE/LYPLSRMSAIFHS |
| | | | | RWMSGEVVGRGPA*GSGIRTMSSEEKCTGAC*ATGVPERAEEGA |
| | | | | ATEVGSSAPPPRPRPASAGFRFVPGFFLFFSVCVRMVRPLPSHRG |
| 919 | A | 243 | 428 | MHGLFGQCFQEALGFLLLPRFPQSSQMLKFLKVDVTGSLTTNKL |
| | | | | AVTVFETQYLWQLTSNQ* |
| 920 | A | 240 | 461 | GLVFSRLSPEYYDLARAHLRDEEKSCPCLAQEGPQGDLLTKTQE |
| | | | | LGRDYRTCLTIVQKLKKMVDKPTQRSVSNA |
| 921 | A | 1252 | 1190 | FFQVFIFLFLIFFKTEFHSCCPGAVQWHDLDSLQPPPPRFKGFS |
| | | | | CLSLPSSWDYRHAPAHPANFVFLVETGFLHV\GQ\ASLELPTSG |
| | | | | DTPAS\ASQSAGITGVSHHA*PRASGRRCW |
| 922 | A | 3 | 414 | HASGLSEASHSKKTVKKVVVVEQNGSFQVKIPKNFVCEHCFGAF |
| | | | | RSSYHLKRHILIHTGEKPFECDICDMRFIQKYHLERHKRVHSGE |
| | | | | KPYQCERCHQVRLIPATIPHTHFSFPKNQGHPPLLPDKRATSVT |
| | | | | RHNS |
| 923 | A | 221 | 935 | REAEGWVGWKDCPARLQLLGPTPHVGPVARSAAALSLEPWDLDH |
| | | | | SPP*SAEGCCSSPDVYTGADWRPSLGYQGNSSWAHSGPGQLPHA |
| | | | | MPAAGGAGGERLTGGRRALVHHCSRPRPRPSNEPTVAEGATTVA/ |
| | | | | ASARAAADRPA/P*GRQGKGRRP/AP*ERGPPQHSGGRGTGVRP |
| | | | | SAAATGNQGRVVACPPTGSVLEPRSLRRPPEAAVHLAPALTTGR |
| | | | | RTRLGESRGSADPAVTPASG |
| 707 | A | 609 | 785 | LGLEHISSSGEKYYYNCRTEVSQWGKTPKSGLERGQRQKEANKM |
| | | | | AVNSFPKDRDYRREVMQATATSGFASGKSTSGDKPVSHSCTTPS |
| | | | | TSSASGLNPTSAPPTSASAGPCFSVFHSSPIP/TLTSGPKSS*T |
| | | | | IAVLLWKPRCSLIILMWT*SIINEVLTGDVTQASLQTTTHKCLT |
| | | | | AGPSVFKITSLISQAAQLSTQAQASNQSPMSLTSDASSPRTICF |
| | | | | SKE*GTPQT*\PVPIQTFGFSTPPVSSQPKVSTPVVKQGPVSQS |
| | | | | ATQQPVTADKQQGHEPVSPRSLQRSSSQRSPSPGPNHTSNSSNA |
| | | | | SNATVVPQNSSARSTCSLTP/VTSSTLQ*KSTTTIVEQKFHNGE |
| | | | | KPQRVAWKEDRDKKKQTRWQSTASQKIGITEER |
| 924 | A | 3 | 473 | PAPAARSRELLKELRNGQDMDTVVFEDVVVDFTLEEWALLNPAQ |
| | | | | RKLYRDVMLETFKHLASVDNEAQLKASGSISQQDTSGEKLSLKQ |
| | | | | KIEKFTRKNIWASLLGKNWEEHSVKDKHNTKERHLSRNPRVERP |
| | | | | CKSSKGNKRGRTFRKTRNCNRHLRR |

[0477] TABLE 9

| | | | | Identification of Priority |
|---|---|---|---|---|
| SEQ ID NO: | SEQ ID NO: of | | | Application that contig |
| of full-length | full-length | SEQ ID NO: of | SEQ ID NO: of | nucleotide sequence was |
| nucleotide | peptide | contig nucleotide | contig peptide | filed (Attorney Docket |
| sequence | sequence | sequence | sequence | No._SEQ_ID_NO.) * |
| 1 | 245 | 489 | 707 | 784_740 |
| 2 | 246 | 490 | 708 | 784_9374 |
| 3 | 247 | 491 | 709 | 792_5634 |
| 4 | 248 | 492 | 710 | 784_4647 |
| 5 | 249 | 493 | 711 | 787_1136 |
| 6 | 250 | 494 | 712 | 790_10073 |
| 7 | 251 | 495 | 713 | 784_5294 |
| 8 | 252 | 496 | 714 | 790_28178 |
| 9 | 253 | 497 | 715 | 791_3741 |
| 10 | 254 | 498 | 716 | 784_4126 |
| 11 | 255 | 499 | 717 | 789_4043 |
| 12 | 256 | 500 | 718 | 784_1461 |
| 13 | 257 | 501 | 719 | 790_28178 |
| 14 | 258 | 502 | 720 | 784_10077 |
| 15 | 259 | 503 | 721 | 784_4160 |
| 16 | 260 | | | |
| 17 | 261 | 504 | 722 | 790_19526 |
| 18 | 262 | 505 | 723 | 784_9991 |
| 19 | 263 | | | |
| 20 | 264 | 506 | 724 | 784_7685 |
| 21 | 265 | 507 | 725 | 784_5439 |
| 22 | 266 | 508 | 726 | 784_682 |
| 23 | 267 | 509 | 727 | 784_900 |
| 24 | 268 | 510 | 728 | 784_455 |
| 25 | 269 | 511 | 729 | 784_5952 |
| 26 | 270 | 512 | 730 | 784_3473 |
| 27 | 271 | | | |
| 28 | 272 | 513 | 731 | 784_2029 |
| 29 | 273 | 514 | 732 | 784_2029 |
| 30 | 274 | | | |
| 31 | 275 | 515 | 733 | 784_2133 |
| 32 | 276 | 516 | 734 | 790_6724 |
| 33 | 277 | 517 | 735 | 784_2405 |
| 34 | 278 | 518 | 736 | 792_748 |
| 35 | 279 | 519 | 737 | 784_2231 |
| 36 | 280 | 520 | 738 | 784_2406 |
| 37 | 281 | 521 | 739 | 784_2406 |
| 38 | 282 | 522 | 740 | 784_2406 |
| 39 | 283 | 523 | 741 | 787_4493 |
| 40 | 284 | 524 | 742 | 784_5207 |
| 41 | 285 | 525 | 743 | 787_3535 |
| 42 | 286 | 526 | 744 | 784_1319 |
| 43 | 287 | 527 | 745 | 784_4272 |
| 44 | 288 | 528 | 746 | 787_132 |
| 45 | 289 | 529 | 747 | 784_2533 |
| 46 | 290 | 530 | 748 | 790_27260 |
| 47 | 291 | 531 | 749 | 784_3514 |
| 48 | 292 | 532 | 750 | 790_19778 |
| 49 | 293 | 533 | 751 | 784_1931 |
| 50 | 294 | 534 | 752 | 784_10013 |
| 51 | 295 | 535 | 753 | 784_2073 |
| 52 | 296 | 536 | 754 | 784_3028 |
| 53 | 297 | 537 | 755 | 787_3541 |
| 54 | 298 | 538 | 756 | 787_3541 |
| 55 | 299 | 539 | 757 | 787_2068 |
| 56 | 300 | 540 | 758 | 784_2127 |
| 57 | 301 | 541 | 759 | 784_8309 |
| 58 | 302 | 542 | 760 | 790_18776 |
| 59 | 303 | 543 | 761 | 784_9362 |
| 60 | 304 | 544 | 762 | 790_8075 |
| 61 | 305 | 545 | 763 | 785_242 |
| 62 | 306 | 546 | 764 | 784_4775 |
| 63 | 307 | 547 | 765 | 784_4325 |
| 64 | 308 | 548 | 766 | 784_7365 |
| 65 | 309 | 549 | 767 | 787_6838 |
| 66. | 310 | 550 | 768 | 787_4689 |
| 67 | 311 | 551 | 769 | 784_5834 |
| 68 | 312 | 552 | 770 | 787_6059 |
| 69 | 313 | 553 | 771 | 787_2566 |
| 70 | 314 | 554 | 772 | 784_5823 |
| 71 | 315 | 555 | 773 | 790_23066 |
| 72 | 316 | 556 | 774 | 787_6376 |
| 73 | 317 | 557 | 775 | 784_7830 |
| 74 | 318 | 558 | 776 | 784_5371 |
| 75 | 319 | 559 | 777 | 789_1692 |
| 76 | 320 | | | |
| 77 | 321 | 560 | 778 | 784_2629 |
| 78 | 322 | 561 | 779 | 784_4490 |
| 79 | 323 | 562 | 780 | 784_1862 |
| 80 | 324 | 563 | 781 | 787_6106 |
| 81 | 325 | 564 | 782 | 784_5283 |
| 82 | 326 | | | |
| 83 | 327 | 565 | 783 | 784_1050 |
| 84 | 328 | 566 | 784 | 787_2903 |
| 85 | 329 | 567 | 785 | 784_5693 |
| 86 | 330 | | | |
| 87 | 331 | 568 | 786 | 787_2946 |
| 88 | 332 | 569 | 787 | 784_8877 |
| 89 | 333 | 570 | 788 | 784_8877 |
| 90 | 334 | 571 | 789 | 784_2265 |
| 91 | 335 | 572 | 790 | 791_5470 |
| 92 | 336 | 573 | 791 | 788_5773 |
| 93 | 337 | 574 | 792 | 788_7171 |
| 94 | 338 | 575 | 793 | 784_4872 |
| 95 | 339 | 576 | 794 | 784_262 |
| 96 | 340 | 577 | 795 | 787_4845 |
| 97 | 341 | | | |
| 98 | 342 | 578 | 796 | 785_82 |
| 99 | 343 | 579 | 797 | 787_2256 |
| 100 | 344 | 580 | 798 | 787_3416 |
| 101 | 345 | 581 | 799 | 787_3416 |
| 102 | 346 | 582 | 800 | 787_5278 |
| 103 | 347 | 583 | 801 | 784_3751 |
| 104 | 348 | 584 | 802 | 784_2890 |
| 105 | 349 | 585 | 803 | 785_411 |
| 106 | 350 | 586 | 804 | 790_12090 |
| 107 | 351 | 587 | 805 | 787_2946 |
| 108 | 352 | 588 | 806 | 787_8399 |
| 109 | 353 | 589 | 807 | 790_3720 |
| 110 | 354 | 590 | 808 | 784_8877 |
| 111 | 355 | | | |
| 112 | 356 | 591 | 809 | 784_7066 |
| 113 | 357 | 592 | 810 | 790_23188 |
| 114 | 358 | 593 | 811 | 784_2661 |
| 115 | 359 | 594 | 812 | 784_10060 |
| 116 | 360 | 595 | 813 | 785_1267 |
| 117 | 361 | 596 | 814 | 784_2265 |
| 118 | 362 | 597 | 815 | 784_1914 |
| 119 | 363 | 598 | 816 | 784_9888 |
| 120 | 364 | 599 | 817 | 784_1120 |
| 121 | 365 | 600 | 818 | 787_2628 |
| 122 | 366 | 601 | 819 | 787_4552 |
| 123 | 367 | 602 | 820 | 784_2259 |
| 124 | 368 | 603 | 821 | 784_5456 |
| 125 | 369 | 604 | 822 | 787_3961 |
| 126 | 370 | 605 | 823 | 787_3416 |
| 127 | 371 | 606 | 824 | 784_6744 |
| 128 | 372 | 607 | 825 | 784_2191 |
| 129 | 373 | 608 | 826 | 784_4923 |
| 130 | 374 | 609 | 827 | 784_1956 |
| 131 | 375 | 610 | 828 | 784_961 |
| 132 | 376 | 611 | 829 | 784_2535 |
| 133 | 377 | | | |
| 134 | 378 | 612 | 830 | 784_1653 |
| 135 | 379 | 613 | 831 | 784_5353 |
| 136 | 380 | 614 | 832 | 784_6636 |
| 137 | 381 | 615 | 833 | 784_958 |
| 138 | 382 | 616 | 834 | 784_958 |
| 139 | 383 | 617 | 835 | 784_958 |
| 140 | 384 | | | |
| 141 | 385 | 618 | 836 | 785_1586 |
| 142 | 386 | 619 | 837 | 785_1586 |
| 143 | 387 | 620 | 838 | 784_3692 |
| 144 | 388 | 621 | 839 | 784_9667 |
| 145 | 389 | | | |
| 146 | 390 | 622 | 840 | 787_7648 |
| 147 | 391 | 623 | 841 | 790_22282 |
| 148 | 392 | 624 | 842 | 790_12724 |
| 149 | 393 | 625 | 843 | 784_3455 |
| 150 | 394 | 626 | 844 | 785_502 |
| 151 | 395 | 627 | 845 | 787_5414 |
| 152 | 396 | 628 | 846 | 789_4462 |
| 153 | 397 | 629 | 847 | 788_2519 |
| 154 | 398 | | | |
| 155 | 399 | 630 | 848 | 784_3923 |
| 156 | 400 | 631 | 849 | 790_23386 |
| 157 | 401 | 632 | 850 | 785_3574 |
| 158 | 402 | 633 | 851 | 785_3574 |
| 159 | 403 | 634 | 852 | 790_16843 |
| 160 | 404 | 635 | 853 | 787_2319 |
| 161 | 405 | 636 | 854 | 784_2529 |
| 162 | 406 | 637 | 855 | 784_3379 |
| 163 | 407 | 638 | 856 | 784_8979 |
| 164 | 408 | 639 | 857 | 787_1720 |
| 165 | 409 | 640 | 858 | 784_10082 |
| 166 | 410 | 641 | 859 | 787_181 |
| 167 | 411 | 642 | 860 | 787_181 |
| 168 | 412 | 643 | 861 | 787_181 |
| 169 | 413 | 644 | 862 | 787_181 |
| 170 | 414 | 645 | 863 | 787_2807 |
| 171 | 415 | 646 | 864 | 784_4061 |
| 172 | 416 | 647 | 865 | 785_707 |
| 173 | 417 | 648 | 866 | 790_13676 |
| 174 | 418 | 649 | 867 | 790_13676 |
| 175 | 419 | 650 | 868 | 790_13676 |
| 176 | 420 | 651 | 869 | 784_2932 |
| 177 | 421 | | | |
| 178 | 422 | 652 | 870 | 784_6075 |
| 179 | 423 | 653 | 871 | 789_5561 |
| 180 | 424 | 654 | 872 | 785_582 |
| 181 | 425 | 655 | 873 | 784_9706 |
| 182 | 426 | 656 | 874 | 787_4158 |
| 183 | 427 | 657 | 875 | 784_8264 |
| 184 | 428 | 658 | 876 | 787_5843 |
| 185 | 429 | 659 | 877 | 784_4210 |
| 186 | 430 | | | |
| 187 | 431 | 660 | 878 | 790_16312 |
| 188 | 432 | 661 | 879 | 784_1531 |
| 189 | 433 | | | |
| 190 | 434 | 662 | 880 | 785_3606 |
| 191 | 435 | 663 | 881 | 784_3336 |
| 192 | 436 | 664 | 882 | 784_9961 |
| 193 | 437 | | | |
| 194 | 438 | 665 | 883 | 787_6063 |
| 195 | 439 | 666 | 884 | 791_1603 |
| 196 | 440 | 667 | 885 | 787_4796 |
| 197 | 441 | 668 | 886 | 784_4453 |
| 198 | 442 | 669 | 887 | 790_11226 |
| 199 | 443 | 670 | 888 | 784_9645 |
| 200 | 444 | | | |
| 201 | 445 | 671 | 889 | 787_8691 |
| 202 | 446 | 672 | 890 | 787_10237 |
| 203 | 447 | | | |
| 204 | 448 | 673 | 891 | 789_6142 |
| 205 | 449 | 674 | 892 | 788_13275 |
| 206 | 450 | 675 | 893 | 784_546 |
| 207 | 451 | 676 | 894 | 791_3434 |
| 208 | 452 | 677 | 895 | 791_2649 |
| 209 | 453 | 678 | 896 | 784_3405 |
| 210 | 454 | 679 | 897 | 787_4674 |
| 211 | 455 | | | |
| 212 | 456 | 680 | 898 | 784_3103 |
| 213 | 457 | 681 | 899 | 788_14055 |
| 214 | 458 | 682 | 900 | 784_9636 |
| 215 | 459 | | | |
| 216 | 460 | 683 | 901 | 792_2618 |
| 217 | 461 | 684 | 902 | 790_27561 |
| 218 | 462 | 685 | 903 | 784_9032 |
| 219 | 463 | 686 | 904 | 787_1260 |
| 220 | 464 | 687 | 905 | 790_2677 |
| 221 | 465 | 688 | 906 | 790_23824 |
| 222 | 466 | 689 | 907 | 784_9794 |
| 223 | 467 | | | |
| 224 | 468 | 690 | 908 | 784_4057 |
| 225 | 469 | 691 | 909 | 784_8449 |
| 226 | 470 | 692 | 910 | 784_9744 |
| 227 | 471 | | | |
| 228 | 472 | 693 | 911 | 788_5898 |
| 229 | 473 | | | |
| 230 | 474 | | | |
| 231 | 475 | 694 | 912 | 784_4762 |
| 232 | 476 | 695 | 913 | 784_3767 |
| 233 | 477 | 696 | 914 | 784_1377 |
| 234 | 478 | | | |
| 235 | 479 | 697 | 915 | 790_16072 |
| 236 | 480 | 698 | 916 | 784_9963 |
| 237 | 481 | 699 | 917 | 784_2480 |
| 238 | 482 | 700 | 918 | 784_355 |
| 239 | 483 | 701 | 919 | 785_2433 |
| 240 | 484 | 702 | 920 | 791_1603 |
| 241 | 485 | 703 | 921 | 787_4174 |
| 242 | 486 | 704 | 922 | 787_2367 |
| 243 | 487 | 705 | 923 | 789_4494 |
| 244 | 488 | 706 | 924 | 784_9639 |

[0478] 784_XXX=SEQ ID NO: XXX of Attorney Docket No. 784, U.S. Ser. No. 09/488,725 filed Jan. 21, 2000, the entire disclosure of which, including sequence listing, is incorporated herein by reference.

[0479] 785_XXX=SEQ ID NO: XXX of Attorney Docket No. 785, U.S. Ser. No. 09/491,404 filed Jan. 25, 2000, the entire disclosure of which, including sequence listing, is incorporated herein by reference.

[0480] 787_XXX=SEQ ID NO: XXX of Attorney Docket No. 787, U.S. Ser. No. 09/496,914 filed 03, 2000, the entire disclosure of which, including sequence listing, is incorporated herein by reference.

### Table 9

[0481] 788_XXX=SEQ ID NO: XXX of Attorney Docket No. 788, U.S. Ser. No. 09/515,126 filed Feb. 28, 2000, the entire disclosure of which, including sequence listing, is incorporated herein by reference.

[0482] 789_XXX=SEQ ID NO: XXX of Attorney Docket No. 789, U.S. Ser. No. 09/519,705 filed Mar. 07, 2000, the entire disclosure of which, including sequence listing, is incorporated herein by reference.

[0483] 790_XXX=SEQ ID NO: XXX of Attorney Docket No. 790, U.S. Ser. No. 09/540,217 filed Mar, 31, 2000, the entire disclosure of which, including sequence listing, is incorporated herein by

[0484] 791_XXX=SEQ ID NO: XXX of Attorney Docket No. 791, U.S. Ser. No. 09/552,929 filed Apr. 18, 2000, the entire disclosure of which, including sequence listing, is incorporated herein by reference.

[0485] 792_XXX=SEQ ID NO: XXX of Attorney Docket No. 792, U.S. Ser. No. 09/577,408 filed May 18, 2000, the entire disclosure of which, including sequence listing, is incorporated herein by reference.

The application's sequence listing, which the Patent Office published only in electronic form, follows.

SEQUENCE LISTING (924 sequences)

SEQ ID NO: 1 - DNA, 2195 bp, Homo sapiens
  CDS (289)..(2082)
tctcccccctccccgacacacactcacaggccgggcattgatggtaatgtatgcgaggaaacagcagagactcagtgatggctgtcacgaccggaggggggactcgcagccttaccaggtgactggagggagttcgctgatttaggaaaaaagaatcatttgcagccagaaagacctgactcgattatttgattatttgcgagtgaaggaatcgatgggatgagatgataggcacttaagtattcatcgaagagtcaccccagtagcggtgatcacagacatgaaaagatgcgagacgccggagatccttcaccaccaaataaaatgttgcggagatctgatagtcctgaaaacaaatacagtgacagcacaggtcacagtaaggccaaaaatgtgcatactcacagagttagagagagggatggtgggaccagttactctccacaagaaaattcacacaaccacagtgctcttcatagttcaaattcacattcttctaatccaagcaataacccaagcaaaacttcagatgcaccttatgattctgcagatgactggtctgagcatattagctcttctgggaaaaagtactactacaattgtcgaacagaagtttcacaatgggaaaaaccaaaagagtggcttgaaagagaacagagacaaaaagaagcaaacaagatggcagtcaacagcttcccaaaagatagggattacagaagagaggtgatgcaagcaacagccactagtgggtttgccagtggaatggaagacaagcattccagtgatgccagtagtttgctcccacagaatattttgtctcaaacaagcagacacaatgacagagactacagactgccaagagcagagactcacagtagttctacgccagtacagcaccccatcaaaccagtggttcatccaactgctaccccaagcactgttccttctagtccatttacgctacagtctgatcaccagccaaagaaatcatttgatgctaatggagcatctactttatcaaaactgcctacacccacatcttctgtccctgcacagaaaacagaaagaaaagaatctacatcaggagacaaacccgtatcacattcttgcacaactccttccacgtcttctgcctctggactgaaccccacatctgcacctccaacatctgcttcagcggtccctgtttctcctgttccacagtcgccaatacctcccttacttcaggacccaaatcttcttagacaattgcttcctgctttgcaagccacgctgcagcttaataattctaatgtggacatatctaaaataaatgaagcagctgtgacacaagcctcactgcagtctataattcataagtttcttactgctggaccatctgctttcaacataacgtctctgatttctcaagctgctcagctctctacacaagcccagccatctaatcagtctccgatgtctttaacatctgatgcgtcatccccaagatcatatgtttctccaagaataagcacacctcaaactaacacagtccctatcaaacctttgatcagtactcctcctgtttcatcacagccaaaggttagtactccagtagttaagcaaggaccagtgtcacagtcagccacacagcagcctgtaactgctgacaagcagcaaggtcatgaacctgtctctcctcgaagtcttcagcgctcaagccagagaagtccatcacctggtcccaatcatacttctaatagtagtaatgcatcaaatgcaacagttgtaccacagaattcttctgcccgatccacgtgttcattaacgcctgcactagcagcacacttcagtgaaaatctcataaaacacgttcaaggatggcctgcagatcatgcagagaagcaggcatcaagattacgcgaagaagcgcataacatgggaactattcacatgtccgaaatttgtactgaattaaaaaatttaagatctttagtccgagtatgtgaaattcaagcaactttgcgagagcaaaggatactatttttgagacaacaaattaaggaacttgaaaagctaaaaaatcagaattccttcatggtgtgaagatgtgaataattgcacatggttttgagaacaggaactgtaaatctgttgcccaatcttaacatttttgagctgcatttaagtagactttggaccgttaagctgggcaa

SEQ ID NO: 2 - DNA, 1220 bp, Homo sapiens
  CDS (165)..(1217)
ccgggaggagccgccggggcagaagccgcacttgttagtgtggggggaggtgggggcgggggacgccgacaccgtcaccgtcacccagggacgccgaggagaaggcgggaggggggtgggggcgagatcaggctccgaccccccgccgaggggatgaggggagcatgggtgccaaggagtcacggatcggattcctcagctacgaggaggcgctgaggagagttacagatgtagagctaaaacgactgaaggatgctttcaagaggacctgtggactctcatattacatgggccagcactgcttcatccgggaagtgcttggggatggagtgcctccaaaggttgctgaggtgatttactgttcttttggtggaacatccaaagggctgcacttcaataatttaatagttggacttgtcctccttacaagaggcaaagatgaagagaaagcaaaatacatttttagtcttttttcaagtgaatctgggaactatgttatacgggaagaaatggaaagaatgctccacgtggtggatggtaaagtcccagatacactcaggaagtgtttctcagagggtgaaaaggtaaactatgaaaagtttagaaattggctttttctaaacaaagatgcttttactttctctcgatggcttctatctggaggtgtgtatgttaccctcactgatgatagtgatactcctactttctaccaaactctggctggagtcacacatttggaggaatcagacatcattgatcttgagaaacgctattggttattgaaggctcaatcccggactggacgatttgatttagagacatttggcccattggtttcaccacctattcgtccatctctaagtgaaggtttgtttaatgcttttgatgaaaatcgtgacaatcacatagattttaaggagatatcctgtgggttatcagcctgttgcaggggacccctggctgaaagacaaaaattttgcttcaaggtatttgatgttgaccgtgatggagttctctccagggttgaactgagagacatggtggttgcacttttagaagtctggaaggacaaccgcactgatgatattcctgaattacatatggatctctctgatattgtagaaggcatactgaatgcacatgacaccacaaaggatagaggctacgaaaaaaagcaacttagtaagaagctgaaactaaaactgttccccaaagagtaa

SEQ ID NO: 3 - DNA, 4126 bp, Homo sapiens
  CDS (214)..(2727)
gacttcaaatgtgacatccactgccttctggtctcccaaatttctgatgagaaatcaactattaatcttattaagctgcttctctattgctgctttccagattctctctttgtccttgggtttcaacactttgactacaacgtgtctcagtaccaaagagaaaattctccagtccaaagtattcggtctcccaagagtcttctttttggggcaatgtctgagatgatcagcccctcagaaaagggttcagctcgaatgaaaaagcgttcaagaaacactttggattcggaggtacctgcagcttaccagactcccaagaagagtcaccagaaatctctgagcttttctaaaactacaccaagaaggatctctcatacaccacaaactccgttgtatactccagaaaggctgcagaagtcccctgcaaaaatgacccctacaaagcaggcagcttttaaggagtccttaaaagactcctcctcacccggccatgactcaccattggattcaaaaatcactcctcaaaaacgacatacccaggcaggagaaggtacctctcttgaaacgaagacaccaagaactcctaagaggcaaggtactcagccgcctgggtttttgccaaactgtacttggccacattcagtgaattccagtccagaaagcccctcctgtccagcccctccaacttcatcgactgcccagcccaggagagagtgtctcactcccatcagagaccctctcagaacacctccgagagcagcagccttcatgggcacgcctcagaatcaaacacaccaacagccccatgtcctcagagctgctcgggcagaggaaccagcccagaaactaaaggataaagctatcaaaactccaaaaagaccagggaattcaactgtgacttcttccccacctgttacgccaaagaaactgtttacctctcctttatgtgatgtctccaagaagagtccatttaggaaatctaaaatagagtgtccttccccaggagaactggatcagaaagagccccagatgtcacccagcgtagctgcatctctctcctgccctgttccctcaactccccctgaactctcacagagagctacattggacaccgtccctcctccacccccttctaaagttgggaaacggtgtagaaagacctctgatcccagaaggagcatcgtggagtgtcagcctgatgcctccgctactcctggggttggcacagctgacagcccagctgcccccacagactctagagatgaccagaagggactgagcctctctcctcagtctcctcctgaaagacggggctacccaggccctggtctcaggagtgattggcatgcatcctctcctctgctcattacaagtgacacagagcatgtcactctcctcagtgaagccgaacaccatggcattggtgacttgaaaagtaacgtcttatcagtggaagagggtgaggggctaaggacagcagatgctgagaagtcttctctgtctcaccctgggattcccccatctcctccttcctgtgggcctggctctcctctgatgccttcccgtgacgtgcactgtaccacagatgggagacagtgccaggcttcggcacaactagacaacctgccagcatcagcttggcattccacagactctgccagcccacagacctatgaggttgagctggagatgcaagcttctggccttcccaaacttcgaattaagaagatagaccccagctcttcattagaggctgagcccctcagcaaggaggagagctctctgggagaagagagcttcctccctgctctcagcatgcccagggccagcaggtccttaagcaaacctgaacccacctatgtgtcacccccctgcccccgcctctcccacagcacacctggcaagagcagggggcaaacctacatctgccaggcctgtacccccacccacggcccttctagtaccccctctccatttcaaacagatggggttccttggacaccatcccccaagcacagtgggaagacaactccagacataattaaagactggcccaggaggaagagggcggtgggctgtggcgccggctcctcttccgggaggggcgaggtcggtgcagaccttcctgggagcctgtcactgcttgagacagagggcaaggaccacggccttgaactcagcatccacaggacgcccatcttggaggattttgagctcgagggagtgtgccagctcccagaccagtcgcctcccaggaacagcatgcctaaggccgaggaagcctcttcctggggacagtttgggttgagttccaggaagagagtcctgttggccaaggaagaagctgaccgtggagccaaaaggatctgtgacctgagagaagattcagaagttagtaagagtaaagaggggtctccaagttggagtgcatggcagctaccctccacgggagacgaagaggtgtttgtttccggctccaccccacctcccagctgtgccgtgcggagctgcctctctgccagtgccctccaggctctgacccagtctccgctgctgttccaggggaaaacaccttcctctcagagcaaagaccccagagatgaggatgtggatgttcttccctccactgtagaagactctcctttcagtcgcgctttctccaggaggcgccccatcagcagaacttatacacggaagaagctcatgggaacctggctggaggacttatagccacaaacattactgagcccaaaagatcaaggagtcagccaggaccctgtggacataaagaagttggatgcctggtcccaagcctcttttgccatggtcagtgttcagattgccattagaatgccttagggttttctaattccccttatggatccaatccatctcctggccctgccccttgttggggaagttgcaggaggagaggtggatggcaatgtgattggtgctataactcaggcagcctgggagtcaggaacccagacaaggaatcccattccagcctcaccccaaccatgaccttggcaagtcagggggccactctgcctcatttatgcaaatggagaaaggcgccctccctggggtcccttgagctgctgtaaggctgggctgctgcgacacaggcagcgctttgtaaactgtgaagccatatacgtgaaactgaagagtgcattgggcagtggaagctattttttgccttccctgtgtaacagtaaaatcatctctagtgactgagcactcagtacatttttgtttaatgttgggcctgaggttaactgtgaccatggtccagcttgagtggcttctggagcagccacattttcaaggactgtccaaaagccagccagttcagggctcaggcctcacccattgcccactcctggggagaccatcacctggctcatcgtttccaccaagagtgccccacaggagtgccccacagacccgctggaccagcctgctgcgggtcctggccaggggtctggctaacggtgagggctgactctgaactgtctctcagtctccagaaagtgttcaagcctgttgtgttcccaaatctgattcctcctattgtcttgtaaatcaaactctaagtgaaaacttcccatttgtcccttcaaagatttttttttattaaatggttttttaagatcctaaaagtctcccagtttcccctatatacataagaacatttaaaacaccaacctggtttgccaaccgaccctttcgtgatgattcttggccaaaaccctgaactaccagcacatccatttacgcttgaaaccagaattgtcctgagaattcgagcagaacccaacgccggcaaattgggttacacacttcacgggaagttactggggggaatggcatatatctttggtaaagaaggccagcattaggcatggccagttgttgtaccgtgagcacaaataaggctgaatagggatacggaagacgcgctacaagcaaggtaatgccgtacacgaggaccacaagagagccccgcagcagggagcataaaaaacacagagaacaaccgcggtacacaaagcggtgtaagaacagggagcaacgtgagcacacagagaaaacgcaggaacacatcacaacaacaaag

SEQ ID NO: 4 - DNA, 6333 bp, Homo sapiens
  CDS (263)..(6094)
cacgaggcctcgtgccgcgtccatttgaacgtctcgcacgccttcctgccattagcactcgagcccgctgctgttgcccgttcttcctccggaataggggagggagagggaatgagaagctgctgcggcccaagagtcactgtgaaggaccccgccgctgccctcgggcctcctcggcccctgcgcctccggggagcagccggggctcgccgcgcctgacgcgtcccgagttatacagaaataatgttgatatttggaacccatgtcgaacttctatgaagaaaggacaacgatgattgcagcaagggatttgcaggaatttgttccttttggtcgagaccactgcaagcaccaccctaatgctttgaaccttcaacttcgccagctgcagccagcttctgaattatggtcttctgatggtgctgctggcttggtgggatcccttcaggaggttacaatccacgagaaacagaaggaaagctggcagttaaggaaaggagtaagtgaaattggagaagatgtggactatgatgaggaactctatgttgctggaaatatggtgatatggagcaaaggaagtaaaagccaggcattggcagtttataaagcatttacagttgacagtcctgttcagcaggcattgtggtgtgacttcattatatcacaggataagtctgaaaaggcctacagtagcaatgaagtagaaaaatgcatatgtatattgcaaagctcatgtattaacatgcatagcatagaaggaaaggattacatagcttcattaccatttcaggttgcaaatgtttggcccactaaatatggattgctgtttgaacgaagcgcttcttcacatgaagtacctccaggttcacccagagaacctttacctactatgttcagcatgctgcacccactagatgaaataactccacttgtttgtaaatctggaagtctttttggttcatcacgggtgcaatatgttgtagatcatgcaatgaaaattgttttcctcaatactgacccctctattgtaatgacttatgatgctgttcaaaatgtgcattctgtgtggactctccggagagtcaaatcagaggaagagaatgttgttttaaagttctctgaacaggggggaaccccacagaatgtggccactagcagctccctcacagcacatctcagaagcctctccaaaggagattcccctgtgacttcacctttccagaattactcctccattcacagccagagtcgctcaacctcatcacccagtctacattctcgctcaccttctatttccaacatggcagctctaagtcgtgctcattctcctgcgttaggagtgcactctttttcaggggtgcaaaggttcaacatttcaagccataatcagtctccaaagagacatagtatttctcattctccaaatagtaattctaatggctcctttcttgcaccagaaacggagccaattgttcctgaactgtgtattgaccatttgtggacagaaacgattactaatataagagagaaaaattcacaagcctcaaaagtgtttattacatctgacctatgtgggcaaaagttcctgtgctttttagtagagtcccagctccagttacgctgtgtaaagtttcaagagagtaatgataaaacccagctcatctttggttcagtgaccaacataccagcaaaggatgcagcaccagtggagaaaatagacaccatgctggtcttggaaggcagtggaaacctggtgctatacacaggagtggttcgggtgggaaaggtttttattcctggactgccagctccctctctgacgatgtccaacacaatgcctcggcccagtactccactagatggcgttagtactccaaagcctcttagtaaactccttggatcattggacgaggttgttctgttgtccccagttccagaactgagggattcttcaaaacttcatgattctctctataatgaggattgtactttccaacagcttggaacttacattcattctatcagagatcctgtccataacagagtcaccctggaactgagtaatggctccatggttaggatcactattcctgaaattgccacctctgagttagtacaaacgtgtttgcaagcaattaagtttatcctgccaaaagaaatagcagttcagatgcttgtcaagtggtacaatgtccacagtgctccaggaggacccagttatcactcagagtggaatttatttgtgacttgtctcatgaacatgatgggttataacacagaccgcttagcatggactagaaattttgactttgaaggatcactttctcctgtcattgcgcccaaaaaagcaaggccttccgagactggatctgatgatgactgggaatatttactaaattcagactaccaccagaatgttgagtctcatcttttgaacagatctttatgtctgagtccttcagaagcttcacagatgaaggatgaggatttttcacagaatctcagtctggattcttctacacttctctttactcacatacctgcaatttttttcgttcttcaccttgtgtatgaggagcttaagttgaatactctaatgggagaaggaatttgttcacttgttgaacttctcgttcagttggcaagggacttaaaattggggccttatgtagatcattactatagagactacccaacgcttgtcagaactactggacaagtgtgcacaattgatccaggtcaaacaggatttatgcatcatccatcattttttacgtctgagccaccaagtatttatcagtgggtgagttcttgtctgaagggtgaaggaatgccaccttatccttacctccctggaatctgtgaaagaagcagacttgtagtcttgagtattgcactgtacatacttggtgatgagagcttggtttctgatgaatcctcacagtatttaaccagaataactatagccccccagaagttgcaagtagaacaagaggaaaacaggtttagtttcaggcattctacatctgtttctagtctagctgaaagattggttgtctggatgactaatgtaggattcactttaagagatttggaaactcttccctttggaattgctcttcccatcagagatgcaatttatcactgtcgtgagcagcctgcctcagactggccagaagctgtctgtctcttgattggacgtcaggatctttccaagcaggcctgcgaaggaaacttacccaaagggaagtctgtgctctcatcagatgttccttcaggaacagaaactgaggaggaagatgacggcatgaatgacatgaatcacgaggtcatgtcattaatatggagtgaagatttaagggtgcaggatgtgcgaaggcttcttcagagtgcgcatcctgtccgtgtcaatgtagtgcagtacccagagctcagtgaccacgagttcatcgaggaaaaggaaaacagattgctccaattgtgtcagcgaactatggctcttcctgtaggacgaggaatgtttaccttgttttcgtaccatcctgttccaacagagccattgcctattcctaaattgaatctgactgggcgtgcccctcctcggaacacaacagtagaccttaatagtggaaacatcgatgtgcctcccaacatgacaagctgggccagctttcataatggtgtggctgctggcctgaagatagctcctgcctcccagatcgactcagcttggattgtttacaataagcccaagcatgctgagttggccaatgagtatgctggctttctcatggctctgggtttgaatgggcaccttaccaagctggcgactctcaatatccatgactacttgaccaagggccatgaaatgacaagcattggactgctacttggtgtttctgctgcaaaactaggcaccatggatatgtctattactcggcttcttagcattcgcattcctgctctcttacccccaacgtccacagagctggatgttcctcacaatgtccaagtggctgcagtggttggcattggccttgtatatcaagggacagctcacagacatactgcagaagtcctgttggctgagataggacggcctcctggtcctgaaatggaatactgcactgacagaaagtcatactccttagctgctggcttggccctgggcatggtctgcttggggcatggcagcaatttgataggtatgtctgatctcaatgtgcctgagcagctctatcagtacatggttggaggacataggcgctttcaaacaggaatgcatagggagaaacataaatcaccaagttatcaaatcaaagaaggagataccataaatgtggatgtgacttgtccaggtgctactctagctttggctatgatctacttaaaaaccaataacagatctattgcagattggctccgagcccctgacaccatgtatttgttggactttgtgaagccagaatttctcttgcttaggacacttgctcgatgcctgattttgtgggatgatattttaccaaattccaagtgggttgacagcaatgttcctcaaattataagagaaaatagtatctctctcagtgaaatcgaattgccgtgctcagaggatttgaatttggaaactttgtcccaagcacatgtctacataattgcaggagcctgcttgtctctgggttttcgatttgctggctcagaaaacttatcagcatttaactgtttgcataaatttgccaaagattttatgacttatttgtccgcacctaatgcttctgttacaggtcctcataacctagaaacttgtctgagcgtggtgctgctgtctctcgccatggtcatggctggctcaggaaacctaaaggttttgcagctttgtcgcttcttacacatgaaaacgggtggtgaaatgaactatggttttcacttagcccaccacatggcccttggacttctatttttgggaggaggaaggtactctttgagcacatcaaattcttccattgccgctcttctctgtgccctttatccgcacttcccagctcacagcactgacaaccggtatcatctccaggctctccggcacctctatgtgctggccgcggagcccaggcttctagtgcctgtggatgtggacacaaacacgccctgctatgccctcttagaagttacctacaagggcactcagtggtatgaacaaaccaaagaagaattgatggctcctacccttcttccagaactccatcttttaaagcagattaaagtaaaaggcccaagatactgggaactgctcatagatttaagcaaaggaacacaacacttgaagtccatcctttccaaggatggggttttatatgttaaactccgggcgggtcagctctcctacaaagaagatccaatgggatggcaaagtttgttggctcagactgttgctaacaggaactctgaagcccgggctttcaagccagaaacaatctcagcattcacttctgatccagcacttctgtcatttgctgaatatttctgcaagccaactgtgaacatgggtcagaaacaggaaattctggatctcttttcttcagtactctatgaatgtgttacccaggagaccccagagatgttgcctgcatacatagcaatggatcaggctataagaagacttgggagaagagaaatgtctgagacttctgaactttggcagataaagttggtgttagagtttttcagctcccgaagccatcaggagcggctgcagaaccaccctaagcgggggctctttatgaactcggaattcctccctgttgtgaagtgcaccattgataataccctggaccagtggctacaagtcgggggtgatatgtgtgtgcacgcctacctcagcgggcagcccttggaggaatcacagctgagcatgctggcctgcttcctcgtctaccactctgtgccagctccacagcacctgccacctataggactagaagggagcacaagctttgctgaactgctcttcaaatttaagcagctaaaaatgccagtgcgagctttgctgagattggctcctttgcttcttggaaatccacagccaatggtgatgtgaccgtgtctggcggtgaacctaccctgaaacgtgacttctgcacaacaaacgtgaccaaacatcaaagctaaagcaatgtttataaagttttatggtataactagggggaaatgagctgcacaaacctcaatgtattttaaatctgttgctgtcatcattaacggtatatgacatataaaagcaagttaaaatttacttttgtaaataaagtttttggtttgtttccaaaaaaaaaa

SEQ ID NO: 5 - DNA, 5398 bp, Homo sapiens
  CDS (222)..(3971)
cccgcccccgctcccgccgccgcccgccagtcagtcagtcagtcagtcagtcagtcagtcagtcagtcagtcactgagcgcgcggcgcgggagctgctggcagtcgctgcgtctctggcgagggagcgccgcgcctggggaggaggcggaggcagcggctggaggagcgcgagcggcggtttccttgcccggggccgcgggaaggccgaccgactgccgcgatggagcagctatcagatgaagaaattgatcatggtgctgaagaagacagtgacaaggaagatcaggacctggacaaaatgtttggagcctggcttggagaactagacaaactcactcagagtttggattctgacaagcccatggaaccagtaaaaagatctcctcttcgccaggaaacaaacatggccaacttttcttaccgcttctccatatacaacttgaatgaagctctgaatcagggagagactgtggatctggatgccttgatggctgatctttgctctatagagcaggagctcagcagcattggttcaggaaacagtaagcgtcaaatcacagaaacgaaagctactcagaaattgcctgttagccgacatacattgaaacatggcaccttgaaaggattatcttcttcatctaataggatagctaaaccttcccatgccagctactccttggacgacgtcactgcacagttagaacaggcctctttgagtatggatgaggctgctcagcaatctgtactagaagatactaaacccttagtaactaatcagcacagaagaaccgcgtcagcaggcacagtgagtgatgctgaagtacactctattagtaattcctcccattccagcatcacttccgcagcctccagcatggactctttggatattgataaagtaacacgccctcaagagctggatttgacacatcaagggcagccaattactgaggaagaacaggcagcaaaattgaaagctgagaagatcagagttgccctagagaaaattaaagaggcacaagtgaaaaagctggtgatcagagtccacatgtctgatgacagttctaaaacaatgatggtggatgagaggcagacagtaagacaagtactggataacctgatggacaaatcccactgcggttatagtttagactggtcactggtagaaaccgtttctgaattacaaatggagagaatctttgaagaccatgaaaacttggttgaaaatcttcttaattggacaagagatagccaaaacaagcttatatttatggagcgtatagaaaaatatgcacttttcaaaaacccacagaattatcttttggggaaaaaggaaacagctgagatggcagatagaaacaaagaagtcctcttggaggaatgtttttgtggaagttctgtaactgtaccagaaattgaaggagtcctttggttgaaggatgatggcaagaagtcctggaaaaagcgttattttctcttgcgagcatctggtatctactatgttcccaaaggaaaagcaaaggtctctcgggatctggtgtgctttctccagctggatcatgtcaacgtttattatggccaggactatcggaacaaatacaaagcacctacagactattgtctggtgctgaagcatccacaaatccagaagaaatctcaatatatcaaatacctttgttgtgatgatgtgaggacactgcatcagtgggtcaatgggatccgcattgcaaagtatgggaagcagctctatatgaactaccaagaagccttgaagaggacagagtcagcctatgattggacttccttatccagctccagcattaaatcgggatccagttcttccagcatcccagagtctcagtcaaaccactccaatcagtctgatagcggagtttctgacacccagccagcaggacacgtccgttcccagagcattgtgagctccgtattctctgaagcctggaaacgaggcactcagttggaagagtccagcaaggccagaatggagtctatgaatcggccctacacttcacttgtgccccctttatccccgcaacctaagatagtcaccccctacactgcttcacagccttcaccacctctacctcctccgccacccccacctcctcctccaccaccccctccaccaccccctcctcccccactccccagccagtctgcaccttctgcaggctcagcagccccaatgttcgtcaagtacagcacaataacacggctacagaatgcgtctcagcattcaggggccctgtttaagccgccaacacccccagtgatgcagtcacagtcagtgaagcctcagatcctggtaccccccaatggagttgttccaccaccccctccccctcctccacccccaaccccaggctctgccatggcccagctaaagcctgcaccgtgtgccccatcccttccacagttcagtgccccgcctcctccactgaagatccatcaagttcagcatattactcaggtggctcccccaacaccccccccacctcctcctatccctgcacccctccctccccaagctcccccaaaaccccttgtgaccatccccgcaccaaccagcaccaagactgtggcacctgttgtgactcaagctgcaccacccacacctactcctccagtgcccccagcaaaaaagcagccagctttccctgcttcttacattccaccctctccccctacccctcctgttccagtacccccgccaacattacccaagcaacagagcttctgtgcaaaaccccctccctctccactgtcaccggtgccctcggtcgtgaagcagatagccagccagtttccaccccctccaactccccctgccatggaatctcagcccttaaagcctgtcccagcaaatgtagctccacagtcccctcctgcagtaaaagcaaagcccaagtggcagcccagctccatcccagtcccttctccggacttccctcctccccctcctgaaagcagcctggtgtttcctcctccacccccatcacctgtcccagccccaccaccgccacctccacccacagcttctcctacccctgacaaaagtggatctccaggcaaaaagaccagtaagacgtccagccctgggggaaagaaaccacccccaaccccacagcgcaactccagcattaaatccagcagtggtgcagagcaccccgagcccaagagaccctcggtggacagtctagtcagcaagtttacaccgccagcagaatcagggtctcccagcaaggagaccctaccacctcctgcagcaccccccaagcctggaaaactcaatctttctggagtcaaccttcctggagttctccaacaagggtgtgtgtcagcaaaagcccctgttctgagtgggcgtggaaaggactccgtggtggaatttccttctcctccatccgattctgattttccaccccctccacctgaaacagaccttcctctgccccccattgagattccagcagttttctcgggaaacacctctccaaaagtggcagtcgttaatcctcaaccacaacaatggtctaaaatgtcagtgaagaaggcccctccacccacacgacccaaacggaatgatagcacccgcctcactcaagctgagatttctgagcagccaacaatggccacagttgtgccacaagtgcccacctctcccaaatccagccttagtgtccagcctggattcctggctgacctcaacaggacactgcaacgaaagtccatcactcggcacggctcactctcctcccgcatgtccagagcagaaccaacagccaccatggatgatatggcattgcctccaccaccccctgaactgctgtctgatcaacagaaggctggttacggaggcagtcatatatcaggctatgcaacgttgcggagaggacctcctcctgctccccccaaaagagaccagaacaccaagctctccagagactggtagccaccataggactttattttcatgatatctgtaatcactgctacaatcagctcacctgatcatctgtgaattcaggtgttcagagcctcctggtatgatgttattcaggtagtgtccagctatatgtgtatgtgtgtgtgtacacgtgcatgtacacacagctgtacagtgtgtgtatatatgtatacatatatgtatgtgtatgtgtatatagagagagagctgagagttattctatttattccttttctctcctaatctgaaaatgggtgttctgtattttgggtggaagaggcatagaaggggatgtgtgttgtctcttaagatttctatatcatgtggattggaccaaaaacttctaatcacttatttagaaggtatttataagtgtctgtccatgtgtagcctattcgtgcatgttgtgtattatataactaaggaatagatgtagaatgtgctatttctggttgagaaaaatcaccagaatgtttggtgtatctataaggcttttgtgtttgtttttccccagttggctgaagttagaattgcttgactgacacttcattgctatacatgaaggggcactttaaatcaggaaaatctctcagcttcatagaacgggtaactagtgcaggatggggaaatgttcacagacatcatctgtatgtggttgtgcatagaaagtaaatacatggcgtaattaactcagctgttctagctgcagtactgctgcagtgatccacccacatttaggatgtgctgacagataagctctttgcctacaatacatggataattagtgctataattctggatagttcctttttagtactgttttatgaagctttatcaacttggcttcatgatcctcactttgattgattttaagaggatggataacacagttatctctgtaatgttctgtcccagtatgtctttgggtcaccagttaccttcttaaaatatgtgctttaggtaggtgttattacatatctgtagacaattggtatatgaaatatacacatcctgtgccccaatatggtgcattatgaaaaacaaaatcattttctaaaatgcattttttgagcattgctctatagaagggaagggtgatgagagaacagaactggcccctgtacaggtgtcattaatctggttgtatatgggttataatatgtaatacaaaaagctcattaagtatgggactacatggagagggaagacagtttcatttatagctactggggctaccaggacccttgctgactgcagcctggttgtgattagttcaggttactaggtgttctgatggagtgggacagtccaagtccagtaactgacattacgttttatgcgtgtgcagtttggtataacgtggagtcagtgctctaacgacacactagttctagatcgcgagcggccgc

SEQ ID NO: 6 - DNA, 3206 bp, Homo sapiens
  CDS (381)..(2462)
atcagcactggaacctctggcaattacctgcagctgatgcgttctggagactcgccctctggaaacaaggtgccaaccgcagagatagtgaatttctacattcaacatacaagtgggaattccgatttgcaggagccgccttcaaacccccggagcggcggaaaggagtgcggaagggccctgcccaggctgcgggccgcgccgctgcggacgcgcccctagaaggggttagattatcggcagacccccctcccgggcgaagcataagggagaccccagatcacccgctgtacccgtctgcggctctctcgtgggccccccccccggcacccctctgcgcgccgcctggagggcgagggcaccgggccgaggcgcacagcatggagtggggttacctgttggaagtgacctcgctgctggccgccttggcgctgctgcagcgctctagcggcgctgcggccgcctcggccaaggagctggcatgccaagagatcaccgtgccgctgtgtaagggcatcggctacaactacacctacatgcccaatcagttcaaccacgacacgcaagacgaggcgggcctggaggtgcaccagttctggccgctggtggagatccagtgctcgcccgatctcaagttcttcctgtgcagcatgtacacgcccatctgcctagaggactacaagaagccgctgccgccctgccgctcggtgtgcgagcgcgccaaggccggctgcgcgccgctcatgcgccagtacggcttcgcctggcccgaccgcatgcgctgcgaccggctgcccgagcaaggcaaccctgacacgctgtgcatggactacaaccgcaccgacctaaccaccgccgcgcccagcccgccgcgccgcctgccgccgccgccgcccggcgagcagccgccttcgggcagcggccacggccgcccgccgggggccaggcccccgcaccgcggcggcggcaggggcggtggcggcggggacgcggcggcgcccccagctcgcggcggcggcggtggcgggaaggcgcggccccctggcggcggcgcggctccctgcgagcccgggtgccagtgccgcgcgcctatggtgagcgtgtccagcgagcgccacccgctctacaaccgcgtcaagacaggccagatcgctaactgcgcgctgccctgccacaacccctttttcagccaggacgagcgcgccttcaccgtcttctggatcggcctgtggtcggtgctctgcttcgtgtccaccttcgccaccgtctccaccttccttatcgacatggagcgcttcaagtacccggagcggcccattatcttcctctcggcctgctacctcttcgtgtcggtgggctacctagtgcgcctggtggcgggccacgagaaggtggcgtgcagcggtggcgcgccgggcgcggggggcgctgggggcgcgggcggcgcggcggcgggcgcgggcgcggcgggcgcgggcgcgggcggcccgggcgggcgcggcgagtacgaggagctgggcgcggtggagcagcacgtgcgctacgagaccaccggccccgcgctgtgcaccgtggtcttcttgctggtctacttcttcggcatggccagctccatctggtgggtgatcttgtcgctcacatggttcctggcggccggtatgaagtggggcaacgaagccatcgccggctactcgcagtacttccacctggccgcgtggcttgtgcccagcgtcaagtccatcgcggtgctggcgctcagctcggtggacggcgacccggtggcgggcatctgctacgtgggcaaccagagcctggacaacctgcgcggcttcgtgctggcgccgctggtcatctacctcttcatcggcaccatgttcctgctggccggcttcgtgtccctcttccgcatccgctcggtcatcaagcaacaggacggccccaccaagacgcacaagctggagaagctgatgatccgcctgggcctgttcaccgtgctctacaccgtgcccgccgcggtggtggtcgcctgcctcttctacgagcagcacaaccgcccgcgctgggaggccacgcacaactgcccgtgcctgcgggacctgcagcccgaccaggcacgcaggcccgactacgccgtcttcatgctcaagtacttcatgtgcctagtggtgggcatcacctcgggcgtgtgggtctggtccggcaagacgctggagtcctggcgctccctgtgcacccgctgctgctgggccagcaagggcgccgcggtgggcgggggcgcgggcgccacggccgcggggggtggcggcgggccggggggcggcggcggcgggggacccggcggcggcggggggccgggcggcggcgggggctccctctacagcgacgtcagcactggcctgacgtggcggtcgggcacggcgagctccgtgtcttatccaaagcagatgccattgtcccaggtctgagcggaggggagggggcgcccaggaggggtggggaggggggcgaggagacccaagtgcagcgaagggacacttgatgggctgaggttcccaccccttcacagtgttgattgctattagcatgataatgaactcttaatggtatccattagctgggacttaaatgactcacttagaacaaagtacctggcattgaagcctcccagacccagccccttttcctccattgatgtgcggggagctcctcccgccacgcgttaatttctgttggctgaggagggtggactctgcggcgtttccagaacccgagatttggagccctccctggctgcacttggctgggtttgcagtcagatacacagatttcacctgggagaacctctttttctccctcgactcttcctacgtaaactcccacccctgacttaccctggaggaggggtgaccgccacctgatgggattgcacggtttgggtattcttaatgaccaggcaaatgccttaagtaaacaaacaagaaatgtcttaattatacaccccacgtaaatacgggtttcttacattagaggatgtatttatataattatttgttaaattgtaaaaaaaaaaagtgtaaaatatgtatatatccaaagatatagtgtgtacatttttttgtaaaaagtttagaggcttacccctgtaagaacagatataagtattctattttgtcaataaaatgacttttgataaaaaaaaaaaaaaa

SEQ ID NO: 7 - DNA, 2943 bp, Homo sapiens
  CDS (430)..(2436)
cttttgatggaacaaaagaggcaggctgaggctgctccccagcttgttgttttttagatccataaagatttccataggccttaaagtcattacccctttggtcctggttatcaatagtaaaattagattggtaaaaatcaaagtcaaattgtgccaagtttgacatcgtgaccactcccctacccggcgccaagacgcgctgatgtcacgacagcgtgcggcgtgcagacgtcggcaagctgcgcccccgcttcgggttgcttccggatctggtacttgggcagagctccccggggttcattgtcttcgcttcacaggatctgtttgagtcctgtccaccggatcctacggggggtaccttcgaaaaaaaacgggctatgctgctgttgcgtgtgggtaccctctcctgacgcctccgccgcccgggtcatgtggaccctcgtgggtcggggctgggggtgcgcacgcgctctcgcgccacgagccactggggccgcgcttctggtggccccggggccccggtccgcgccgacccttggggctgctccagagtcctgggctaccgacaggctctacagctccgcagaattcaaggaaaaacctgacatgtctaggtttcctgttgaaaatattagaaatttcagtattgttgcacacgtggatcatggcaaaagtactttaactgacaggctcctagaacttacagggacaattgataaaacaaagaataataagcaggttcttgataaattgcaagtggaacgagaaagaggaatcactgttaaagcacagacagcatctctcttttacaattgtgaaggaaagcagtaccttttaaatctcattgatacaccgggccatgttgattttagttatgaagtatccaggtcactttctgcttgccagggtgttttacttgtggttgatgcaaatgagggaattcaagcccaaactgtagcaaacttctttcttgccttcgaagcacagctatcggtaattccagttataaataagatagatctgaagaatgctgatcctgaaagggttgaaaaccaaattgagaaagtgtttgatattccaagtgatgaatgtattaagatttctgctaaacttggaacaaatgttgagagtgttcttcaggcaattattgaaagaatcccccctcctaaagtgcatcgcaaaaatcctctgagagctttggtatttgactccacctttgaccagtatagaggtgtgatagccaatgtagcattatttgacggagtggtttccaaaggagataaaattgtatctgcacatactcaaaagacatacgaagttaatgaagtaggagtcttgaatcctaatgagcagccaactcataaattatatgcaggacaggtgggctatctgattgctgggatgaaagatgtcactgaagcgcaaataggagatacattatgtttacataagcaaccagtggagcccttgcctgggtttaaatcagcgaaaccaatggtatttgcaggaatgtatcctctagaccaatctgaatataacaatctgaagagtgctatagaaaaactgactttaaatgattccagtgtgaccgttcatcgggatagtagccttgctctgggtgctggctggaggctaggatttcttggacttttgcacatggaagttttcaaccagcgactggagcaagaatataatgcttctgttattttaacaacccctactgttccatataaagctgtactgtcatcatcaaaattgataaaggaacatagagaaaaagaaattacaattatcaatcctgcacaattccccgataaatcaaaagtaacagaatatttggagccagttgttttgggcactattatcacaccagatgaatacactggaaaaataatgatgctttgcgaggctcgaagagcagttcagaagaatatgatatttattgatcaaaatagagttatgcttaaatatctctttcctttgaatgaaattgtggtagatttttatgactctttgaaatccctatcttctggatatgctagttttgattacgaagatgcaggctaccagactgcagaacttgtaaaaatggatattctactgaatggaaatactgtagaggagctagtaactgttgtacacaaagacaaagctcattcaattggcaaagccatatgtgaacggctgaaggattctcttcctaggcaactgtttgagatagcaattcaagctgctattggaagtaaaatcattgcaagagaaactgtgaaagcctataggaaaaacgttttggcaaaatgttatggtggtgatattacccgaaaaatgaagcttttgaagagacaagcagaagggaaaaaaaagctgaggaaaattggcaacgttgaagttccaaaagatgcttttataaaagttctgaaaacacaatcttctaaataattggtgggaaaacaaagaattttcattgcaatttgtaatatgctgacaacagaaagaaaattataaaatttgcttgttactttcagggtattcaggttcaaataacctactagtctttcgttgaaagggagtagttagtgggtaggcaagagcttagattttgaagccatgttgcctgttctcaaatatctgttccaaccactcactagtaaggtgaccgtggccagattaacctttgtttcctcttcagtaaaatcgagattatactactacctacataagttgttgttgtgaagattaaatgaggtaatacgttaaatattcagaggtgcaagacacatagtaagcactcaattgtaactacagttaagtccttaaatgccatcgaaaggttcttagaaactgactttaagcaaaatgacacgtagcacaatgttcttgaatgatgtcatttccttaagtggtttgtaacatcgatgaggaaaaaaaattggtttatgcgtc

SEQ ID NO: 8 - DNA, 862 bp, Homo sapiens
  CDS (111)..(623)
gcgtgcgttcattttcagcctggtgtggggtgagtggtacccaacgggccggggcgccgcgtccgcaggaagaggcgcggggtgcaggcttgtaaacatataacataaaaatggcttccaaaagagctctggtcatcctggctaaaggagcagaggaaatggagacggtcatccctgtagatgtcatgaggcgagctgggattaaggtcaccgttgcaggcctggctggaaaagacccagtacagtgtagccgtgatgtggtcatttgtcctgatgccagccttgaagatgcaaaaaaagagggaccatatgatgtggtggttctaccaggaggtaatctgggcgcacagaatttatctgagtctgctgctgtgaaggagatactgaaggagcaggaaaaccggaagggcctgggaagtaaagttacaacacaccctcttgctaaagacaaaatgatgaatggaggtcattacacctactctgagaatcgtgtggaaaaagacggcctgattcttacaagccgggggcctgggaccagcttcgagtttgcgcttgcaattgttgaagccctgaatggcaaggaggtggcggctcaagtgaaggctccacttgttcttaaagactagagcagcgaactgcgacgatcacttagagaaacaggccgttaggaatccattctcactgtgttcgctctaaacaaaacagtggtaggttaatgtgttcagaagtcgctgtccttactacttttgcggaagtatggaagtcacaactacacagagatttctcagcctacaaattgtgtctatacatttctaagccttgtttgcagaataaacagggcatttagcaaactaaaaaaaaa

SEQ ID NO: 9 - DNA, 1426 bp, Homo sapiens
  CDS (41)..(928)
aattggcaggacgtgataggacgtggcctggcgcgtggccatggggggctgggcgtggcctggcacatggccgctggcggcgcgtgacgggggcgtggcctggcggtctagggctgggggcgcgcagactccgctgcggcggcgtggctgtgggtcccggattagcggcggcatgggacggttgagttggcaggtggcggccgcggcggctgtgggcctggctctgactctggaggcgctgccttgggtgctgcgctggctgcggtccaggcggcggcggccgcggcgcgaggcgctgttcttcccgtctcaggtgacctgtaccgaggccctgctgcgggctccgggcgcggagctggccgagctccccgagggctgcccgtgcggcctgccccacggcgagagcgcgctaagccgcctgctgcgtgccctgctggccgcccgcgccagcctggatctctgcctgttcgccttctccagcccgcagctgggccgcgccgtgcagttgctgcaccagcgtggggtgcgagtgcgggtcgtcaccgactgcgactacatggccctcaacggctcgcaaatcggtctgctgcgcaaggcagggatccaggtccggcacgatcaagacccaggctacatgcatcacaagtttgccatcgtggacaagagggtgctcatcactggctcgctcaactggaccacgcaagccatccagaacaacagggagaatgttctcatcacggaggacgacgagtacgtgcggctttttctggaagaatttgagcgcatctgggaacagtttaaccctacaaagtatacctttttcccaccaaagaaaagtcacggaagctgtgccccacctgtctccagagctggagggagattgctttcatggcacagaacttgcggcacctccagcgaaagccaaacctaaccaagaatggggctgagccctccctgcgggctgctgtgcgttctgagggagggagacctcggcactagaaaaaaatcgttaaactaaagtctcgtctattagaatactaaattgaactaaagaaggttaggaaagggaaatttctgttacttcgggtcagttatttcgggccagacctttttcttgctcctttgccaaaataacttcagtcacgacctgccacggggtgctttcatgagtgtggtccgtatcttggtttggaatcgaaacttctgctacagcacagaaaaggcacagtgcctcttccaggtcgatcccattcccttccctgattctagaaaagtccctcctgctttggctgatgtgggccctttcagcatctccctgagatttcatccctctctccatgtggcacgactggggttggttggggcctacagtctccttgtccctcacagtctgcccgtgtcagggctcggtcctcagagtaaggaa

SEQ ID NO: 10 - DNA, 2561 bp, Homo sapiens
  CDS (161)..(1321)
gcgagcggctgaggcggcgccggggcgggcgcggagcctggcaaggcgcggtggcggaggcggcgccgacggggactgctgaggcgcgcagagggtcggcggcgcccgggagcctgtcgctggcgcggtccgggcgggaggctcggcggcgggcggcagcatgtcggtggcggggctgaagaagcagttctacaaggcgagccagctggtcagtgagaaggtcggaggggccgaggggaccaagctggatgatgacttcaaagagatggagaagaaggtggatgtcaccagcaaggcggtgacagaagtgctggccaggaccatcgagtacctgcagcccaacccagcctcgcgggctaagctgaccatgctcaacacggtgtccaagatccggggccaggtgaagaaccccggctacccgcagtcggaggggcttctgggcgagtgcatgatccgccacgggaaggagctgggcggcgagtccaactttggtgacgcattgctggatgccggcgagtccatgaagcgcctggcagaggtgaaggactccctggacatcgaggtcaagcagaacttcattgaccccctccagaacctgtgcgagaaagacctgaaggagatccagcaccacctgaagaaactggagggccgccgcctggactttgactacaagaagaagcggcagggcaagatccccgatgaggagctacgccaggcgctggagaagttcgaggagtccaaggaggtggcagaaaccagcatgcacaacctcctggagactgacatcgagcaggtgagtcagctctcggccctggtggatgcacagctggactaccaccggcaggccgtgcagatcctggacgagctggcggagaagctcaagcgcaggatgcgggaagcttcctcacgccctaagcgggagtataagccgaagccccgggagccctttgaccttggagagcctgagcagtccaacgggggcttcccctgcaccacagcccccaagatcgcagaaggggccctgcccgaccgttttgagcccacagcctcctcgttttgcttgtgtttagcttcatcgtctttccgatcttccgacaagcccatccggacccctagccggagcatgccgcccctggaccagccgagctgcaaggcgctgtacgacttcgagcccgagaacgacggggagctgggcttccatgagggcgacgtcatcacgctgaccaaccagatcgatgagaactggtacgagggcatgctggacggccagtcgggcttcttcccgctcagctacgtggaggtgcttgtgcccctgccgcagtgactcacccgtgtccccgccccgcccctccgtccacactggccggcaccccctgctgggtctcctgcattccacggagcccctgctgccagggcggtgtctgagcctgccggcgccacctgggccccggcccttgaggtactccctgagcaggaccccacacttgggtgggggggcttatctgggtgggtggggatgcctgtttacactagcgctgactcccaacggtgacggctcccttccccactccatggcgccagcctcctcccccgctccccaacttctcgcccagctggccgaggcggggcaacactaaggtgctcttagaaacactaatgttcctctggggcagcccccacctccgtcctgacccgacgggggcccggcccactgcctaccctcgagtcccgcagccttaacaggatgggatcgagggtccccatggggtggctcagagataggaccctggttttaaatccctcccagcctggtgctggtgatgggccctggccctactccagggccaatgcacccccgcctcacacacgcactccttctcctcaaggccagggcagagggcctcaccgcctcccgggcctgctgtcagcttgcagcccggggacagaggccagctgggatctgcctgaggacagagaacatggtctcctgcagggccctgcctcccaagccccgccctcagaaagccaagtaccttttcagctttttaactgcccccatcccatcccagggaggcctgtgtcactctggcacaagctgccaccaccagccacccacacccaccccagcacacctcacacgggaccacagccgcgctgccgagggccaagcacaaaggttccagtgagcgcatgtcccagcccctggtggccaggctccccttgctgagccgctgccacttcaccctgtgggaagtggccccagccatctcctctagaccaaggcaggcagccccgacatctgcttcctctatcgcccaatgcaaaatcgatgaaatggggagttctctgggccaggccacattcacattcccctccccctgtggtccagtgaagcctccggaccccaggctctgctctgccctgccctgcacccccctcgtcagaagtacatgaggggcgcagagatgagcacacagctttgggcacggtccagggcaaactgaaatgtacgcctgaattttgtaaacagaagtattaaatgtctctttctacaaaaaaaa

SEQ ID NO: 11 - DNA, 755 bp, Homo sapiens
  CDS (204)..(623)
agagagggggcgagcgaccgagcgccgcgacgcggaagtgaggtgcgtgcgggctgcagcgcagaccccggcccggcccctccgagagcgtcctgggcgctccctcacgccttgccttcaagccttctgcctttccaccctcgtgagcggagaactgggagtggccattcgacgacagtgtggtgtaaaggaattcattagccatggatgtattcatgaaaggactttcaaaggccaaggagggagttgtggctgctgctgagaaaaccaaacagggtgtggcagaagcagcaggaaagacaaaagagggtgttctctatgtaggctccaaaaccaaggagggagtggtgcatggtgtggcaacagtggctgagaagaccaaagagcaagtgacaaatgttggaggagcagtggtgacgggtgtgacagcagtagcccagaagacagtggagggagcagggagcattgcagcagccactggctttgtcaaaaaggaccagttgggcaagtatgaagaaggacccccacaggaagattttgtgaaatatatgcctgtgtctcctcactatgaggtatatgaagccctttcagagaaagggtctcaagtctgcgcccctaacgcataagaaatatctttgctcccagtttcttgagatctgctgacagatgttccatcctgtacaagtgctcagttccaatgtgcccagtcatgacatttctcaaagtttttacagtgtatctcgaagtcttccatc

SEQ ID NO: 12 - DNA, 2918 bp, Homo sapiens
  CDS (68)..(2188)
cagtacggatgtggcgaggagttcgtgagtgagttcagggtcatccggccactgtgcacagccgggcatgccgactgtggtggggcaggcagctccaggcacaggcactggctccgtgcaaggctgtggctggaccaggcatactgcaggtcgcttccattgtgggcactgggaacacggtggcacccggaaacttggagacaccaggaaccgcagagccccaaagaggatgtcacagccctggcttagggagcccctaggtctgggctccccgaagggccgcagctcttctctccttctcgtcgcccacaatgtagcagatatccaagtagagcagaaccggcaacacttctatgaactgtctctcgagtatgtgtgtaagctgcaggaaatccaagaaagaaagaagtttgagtttgtggaacctatgctgtcattttttcaggggatgtttaccttctatcatcagggccatgaacttgccaaagacttcaatcactacaaaatggaactacagatcaacattcagaatacacggaatcgatttgaaggaacaaggtcagaagtggaagagctcatgaacaaaatcagacagaatcccaaggaccacaaacgagcaagtcagtttacagccgaaggctacctgtatgtccaggaaaaaaggcctgctccgtttggttccagttgggtcaaacactattgcatgtatcgaaaagcagcaaagaagttcaacatgatcccatttgagcacagatctggagggaaacttggggacggagaggtgttctttttgaaagaatgtaccaagaggcatactgactccattgacagaaggttttgttttgacatagaagctgctgatcggcctggcgtttccttgaccatgcaggcattttccgaagaggaaaggaagcagtggttggaagctctgggtggaaaggaagctctgtcccatagttttaatacagccatcatcccaagaccagaaggaaatgcacagttggataagatggggttcacaattatcagaaaatgcatcagtgccgttgaaacacgaggtataaatgaccaaggattgtacagagttgtgggggtgagttcaaaggtccagagacttctgagtatgttgatggatgtaaaaacatgcaatgaggtggacctggagaattctgcagattgggaagtgaagacaataacaagtgccttgaaacagtatttgaggagtcttccagagcctctcatgacctatgagttacatggagatttcattgttccagccaaaagcggcagcccagaatctcgtgttaatgcgatccatttcttggtacacaaactgccagagaagaataaagagatgttggatattttggtgaaacacttaacaaatgtttcaaatcactccaagcagaacctgatgactgtggcaaacttaggagtggtgtttggaccaactctgatgaggccacaggaagaaactgtcgctgccctcatggacttgaagtttcagaatattgttgtggaaatcttaattgaaaaccatgaaaagatttttcggacgccgcccgatactacattccctgagcccacctgcctgtcagcatcacccccaaatgcgccaccaaggcagtcgaagagacaaggccagagaaccaagaggcccgtggccgtctacaatctttgtctggagctggaagatggtgacaatccttacccttccaaggaggacacccctaccagcagtctggactcactttcctccccgtctcccgtgactacagctgtccctgggcctcctggaccagacaaaaaccaccttctggcagatggagggagctttggagactgggcatccactatcccaggccagacccgatcgtctatggtccagtggcttaacccacagtctccaaccacaacaagctccaactcagctgtgacacctctttcacccgggtcgtcccctttccccttttctcctcctgctactgtagcggacaagccacctgaaagcatccgcagtcggaaggctcgagccgtgtatccgtgtgaagcagaacacagctcggaattatcttttgaaataggagcaatttttgaggatgtacaaacctccagggaacctggctggctagaagggactctgaacggcaagagggggctgattccacagaactacgtcaagctgctgtagctcctggcctcagagcccctgctgaccctggcacccagggacctgcctgggggcagagagctgtcttcctcctccgaggctctgggctgcacccacaggtacctccacacttgggagttaccatcatcacagtcagccctgggggtggggggtggtgggcagggatgggacgcaccacacagaactgtgattgtggatcaggaggggaatgtcaggattcgcaaaatggacttttcatttgtcaagtattgggacttgtgatttttaattatccagcatatagaatgagagggagggcagccttctgccacctgtgtcgcctccactggcagtcacgccaccagagccaccctggctccctctcctccctgagcacctgctgctgcgattttaaagggaactgtactactcgcagtgataggtttgcagagtgtgtgcttggctgtggcagcctagcttggagaagctgctgttggtgcaagggagatggtctcaagtcagagggaagcagagacgcgcgtctcaagcctgcccttcctagacggccacctgcaggaccccacactcactgcactggcagcgtgcactggcgtatttgtaacaggcttctcggtgctcctcacccgtgtgctgttttccaaacaccacctttttgcctcaaggtctctgtaaatgaaataaactgtaatttactaaaaaaaaaaaaaaaaaaaaaaaaaaaatggtt

SEQ ID NO: 13 - DNA, 786 bp, Homo sapiens
  CDS (77)..(541)
tggtacccaacgggccggggcgccgcgtccgcaggaataggcgcggggtgcaggcttgtaaacatataacataaaaatggcttccaaaagagctctggtcatcctggctaaaggagcagaggaaatggagacggtcatccctgtagatgtcatgaggcgagctgggggaccatatgatgtggtggttctaccaggaggtaatctgggcgcacagaatttatctgagtctgctgctgtgaaggagatactgaaggagcaggaaaaccggaagggcctgatagccgccatctgtgcaggtcctactgctctgttggctcatgaaataggttttggaagtaaagttacaacacaccctcttgctaaagacaaaatgatgaatggaggtcattacacctactctgagaatcgtgtggaaaaagacggcctgattcttacaagccgggggcctgggaccagcttcgagtttgcgcttgcaattgttgaagccctgaatggcaaggaggtggcggctcaagtgaaggctccacttgttcttaaagactagagcagcgaactgcgacgatcacttagagaaacaggccgttaggaatccattctcactgtgttcgctctaaacaaaacagtggtaggttaatgtgttcagaagtcgctgtccttactacttttgcggaagtatggaagtcacaactacacagagatttctcagcctacaaattgtgtctatacatttctaagccttgtttgcagaataaacagggcatttagcaaactaaaaaaaaaaaaaaa

SEQ ID NO: 14 - DNA, 1718 bp, Homo sapiens
  CDS (53)..(1456)
cacaggtcttgggggatagaggtgaccgggccagtgccctggggctctggccatgaagtctcggcagaaaggaaagaagaagggcagcgcaaaggagcgggtttttgggtgcgacttgcaggagcacctgcagcactcaggccaggaggtgccccaggtgctaaagagctgtgcagaatttgtggaggagtatggagtggtggatgggatctaccgcctctcaggggtctcctccaacatccagaagcttcggcaggaatttgagtcagagcggaagccagacctgcgtcgggatgtttacctccaagacattcactgcgtctcctccctgtgcaaggcctatttcagagaactgccggatcccctgctcacttaccggctctatgacaagtttgctgaggctgtaggagtgcaattggaacctgagcgcttggtcaagatcctagaggtgcttcgggaactccctgtcccaaactacaggaccctggagttcctcatgaggcacttggtacacatggcctcattcagtgcccagaccaacatgcatgctcgcaacctggccatcgtgtgggctcccaacctgctgaggtctaaggacatagaggcctcaggcttcaatgggacagcggccttcatggaggtgcgggtacaatccatcgtcgtggagttcatcctcacacacgtggaccagctctttgggggtgctgccctctctggtggtgaggtggagagtgggtggcgatcgcttccagggacccgggcatcaggcagccccgaggaccttatgcccaggccactgccttatcacctgcctagcatactgcaggctggcgatggacccccacagatgcggccctaccatactatcatcgagattgcagagcacaagaggaaggggtctttgaaggtcaggaagtggaggtctatcttcaatttaggtcgctctggccatgagactaagcgtaaacttccacggggggctgaggacagggaggataaatccaacaaggggacactgcggccagccaaaagcatggactcactgagtgctgcagctggggccagtgatgagccagaggggctggtggggcccagcagcccccggccaagcccattgctgcctgagagcttggagaacgattctatagaggcagcagagggtgaacaggagcctgaggcagaagcactgggtggcacaaactctgaaccaggcacaccacgagctgggcggtcagccatccgggctgggggcagcagccgtgcagaacgctgtgctggtgtccacatctcagaccctctgcctccagtcaccatgtgcaagagaggtcctgtacagatctctctgggctctcctttctcctttggaataacttgttcctatttcaggaaagggaaatggtgtcactcaggccctgggactgcttctccagccaggctggggccacaggtcccactctagtgaaggtcaatgtctcagaataaaagctgtatttttacacatagtgtggagtctcattattcttattaaagtctttggtgataggtattatatcttcacatatttggcaaaacattctttttcttcttcttgtttgggtgctcttcctcagttgttgtcatggagactagtggccagaaactagagctaggttcatggtggtcaggaaataaggaagagaaacttatatttacataatgcgttcattatgtgccaggag

SEQ ID NO: 15 - DNA, 3619 bp, Homo sapiens
  CDS (1)..(3354)
  misc_feature (1)...(3619): n = a,t,c or g
atggagccctccagagcgcttctcggctgcctagcgagcgccgccgctgccgccccgccgggggaggatggagcaggggccggggccgaggaggaggaggaggaggaggaggaggcggcggcggcggtgggccccggggagctgggctgcgacgcgccgctgccctactggacggccgtgttcgagtacgaggcggcgggcgaggacgagctgaccctgcggctgggcgacgtggtggaggtgctgtccaaggactcgcaggtgtccggcgacgagggctggtggaccgggcagctgaaccagcgggtgggcatcttccccagcaactacgtgaccccgcgcagcgccttctccagccgctgccagcccggcggcgaggaccccagttgctacccgcccattcagttgttagaaattgattttgcggagctcaccttggaagagattattggcatcgggggctttgggaaggtctatcgtgctttctggataggggatgaggttgctgtgaaagcagctcgccacgaccctgatgaggacatcagccagaccatagagaatgttcgccaagaggccaagctcttcgccatgctgaagcaccccaacatcattgccctaagaggggtatgtctgaaggagcccaacctctgcttggtcatggagtttgctcgtggaggacctttgaatagagtgttatctgggaaaaggattcccccagacatcctggtgaattgggctgtgcagattgccagagggatgaactacttacatgatgaggcaattgttcccatcatccaccgcgaccttaagtccagcaacatattgatcctccagaaggtggagaatggagacctgagcaacaagattctgaagatcactgattttggcctggctcgggaatggcaccgaaccaccaagatgagtgcggcagggacgtatgcttggatggcacccgaagtcatccgggcctccatgttttccaaaggcagtgatgtgtggagctatggggtgctactttgggagttgctgactggtgaggtgccctttcgaggcattgatggcttagcagtcgcttatggagtggccatgaacaaactcgcccttcctattccttctacgtgcccagaaccttttgccaaactcatggaagactgctggaatcctgatccccactcacgaccatctttcacgaatatcctggaccagctaaccaccatagaggagtctggtttctttgaaatgcccaaggactccttccactgcctgcaggacaactggaaacacgagattcaggagatgtttgaccaactcagggccaaagaaaaggaacttcgcacctgggaggaggagctgacgcgggctgcactgcagcagaagaaccaggaggaactgctgcggcgtcgggagcaggagctggccgagcgggagattgacatcctggaacgggagctcaacatcatcatccaccagctgtgccaggagaagccccgggtgaagaaacgcaagggcaagttcaggaagagccggctgaagctcaaggatggcaaccgcatcagcctcccttctgatttccagcacaagttcacggtgcaggcctcccctaccatggataaaaggaagagtcttatcaacagccgctccagtcctcctgcaagccccaccatcattcctcgccttcgagccatccagttgacaccaggtgaaagcagcaaaacctggggcaggagctcagtcgtcccaaaggaggaaggggaggaggaggagaagagggccccaaagaagaagggacggacgtgggggccagggacgcttggtcagaaggagcttgcctcgggagatgaaggatcccctcagagacgtgagaaagctaatggtttaagtaccccatcagaatctccacatttccacttgggcctcaagtccctggtagatggatataagcagtggtcgtccagtgcccccaacctggtgaagggcccaaggagtagcccggccctgccagggttcaccagccttatggagatggccttgctggcagccagttgggtggtgcccatcgacattgaagaggatgaggacagtgaaggcccagggagtggagagagtcgcctacagcattcacccagccagtcctacctctgtatcccattccctcgtggagaggatggcgatggcccctccagtgatggaatccatgaggagcccaccccagtcaactcggccacgagtacccctcagctgacgccaaccaacagcctcaagcggggcggtgcccaccaccgccgctgcgaggtggctctgctcggctgtggggctgttctggcagccacaggcctagggtttgacttgctggaagctggcaagtgccagctgcttcccctggaggagcctgagccaccagcccgggaggagaagaaaagacgggagggtctttttcagaggtccagccgtcctcgtcggagcaccagccccccatcccgaaagcttttcaagaaggaggagcccatgctgttgctaggagacccctctgcctccctgacgctgctctccctctcctccatctccgagtgcaactccacacgctccctgctgcgctccgacagcgatgaaattgtcgtgtatgagatgccagtcagcccagtcgaggcccctcccctgagtccatgtacccacaaccccctggtcaatgtccgagtagagcgcttcaaacgagatcctaaccaatctctgactcccacccatgtcaccctcaccaccccctcgcagcccagcagtcaccggcggactccttctgatggggcccttaagccagagactctcctagccagcaggagcccctccagcaatgggttgagccccagtcctggagcaggaatgttgaaaacccccagtcccagccgagacccaggtgaattcccccgtctccctgaccccaatgtggtcttccccccaaccccaaggcgctggaacactcagcaggactctaccttggagagacccaagactctggagtttctgcctcggccgcgtccttctgccaaccggcaacggctggacccttggtggtttgtgtcccccagccatgcccgcagcacctccccagccaacagctccagcacagagacgcccagcaacctggactcctgctttgctagcagtagcagcactgtagaggagcggcctggacttccagccctgctcccgttccaggcagggccgctgcccccgactgagcggacgctcctggacctggatgcagaggggcagagtcaggacagcaccgtgccgctgtgcagagcggaactgaacacacacaggcctgccccttatgagatccagcaggagttctggtcttagcacgaaaaggattggggcgggcaagggggacagccagcggagatgaggggagctggcgggcacagccctttctcagggttggaccccctgagatccagccctacttcttgcactgataatgcactttgaagatggaagggatggaaacagggccacttcagagggtctcctgccctgcagggcctttctacccgtgtccactggaggggctgtggccatcagctctggctgtgtangggaggaaggcgtgcatgcatgtccc

SEQ ID NO: 16 - DNA, 4774 bp, Homo sapiens
  CDS (186)..(3020)
  misc_feature (1)...(4774): n = a,t,c or g
cggtgcgagcgaacaggagtgggggggaaattaaaaaaagctaaacgtggagcagccgatcggggaccgagaaggggaatcgatgcaaggagcacactaaaacaaaagctacttcggaacaaacagcatttaaaaatccacgactcaagataactgaaacctaaaataaaacctgctcatgcaccatggtttttcaaactcggtacccttcatggattattttatgctacatctggctgctccgctttgcacacacaggggaggcgcaggctgcgaaggaagtactactgctggattctaaagcacaacaaacagagttggagtggatttcctctccacccaatgggtgggaagaaattagtggtttggatgagaactataccccgatacgaacataccaggtgtgccaagtcatggagcccaaccaaaacaactggctgcggactaactggatttccaaaggcaatgcacaaaggatttttgtagaattgaaattcaccctgagggattgtaacagtcttcctggagtactgggaacttgcaaggaaacatttaatttgtactattatgaaacagactatgacactggcaggaatataagagaaaacctctatgtaaaaatagacaccattgctgcagatgaaagttttacccaaggtgaccttggtgaaagaaagatgaagcttaacactgaggtgagagagattggacctttgtccaaaaagggattctatcttgcctttcaggatgtaggggcttgcatagctttggtttctgtcaaagtgtactacaagaagtgctggtccattattgagaacttagctatctttccagatacagtgactggttcagaattttcctctttagtcgaggttcgagggacatgtgtcagcagtgcagaggaagaagcggaaaacgcccccaggatgcactgcagtgcagaaggagaatggttagtgcccattggaaaatgtatctgcaaagcaggctaccagcaaaaaggagacacttgtgaaccctgtggccgtgggttctacaagtcttcctctcaagatcttcagtgctctcgttgtccaactcacagtttttctgataaagaaggctcctccagatgtgaatgtgaagatgggtattacagggctccatctgacccaccatacgttgcatgcacaaggcctccatctgcaccacagaacctcattttcaacatcaaccaaaccacagtaagtttggaatggagtcctcctgcagacaatgggggaagaaacgatgtgacctacagaatattgtgtaagcggtgcagttgggagcagggcgaatgtgttccctgtgggagtaacattggatacatgccccagcagactggattagaggataactatgtcactgtcatggacctgctagcccacgctaattatacttttgaagttgaagctgtaaatggagtttctgacttaagccgatcccagaggctctttgctgctgtcagtatcaccactggtcaagcagctccctcgcaagtgagcggagtaatgaaggagagagtactgcagcggagtgtcgagctttcctggcaggaaccagagcatcccaatggagtcatcacagaatatgaaatcaagtattacgagaaagatcaaagggaacggacctactcaacagtaaaaaccaagtctacttcagcctccattaataatctgaaaccaggaacagtgtatgttttccagattcgggcttttactgctgctggttatggaaattacagtcccagacttgatgttgctacactagaggaagctacaggtaaaatgtttgaagctacagctgtctccagtgaacagaatcctgttattatcattgctgtggttgctgtagctgggaccatcattttggtgttcatggtctttggcttcatcattgggagaaggcactgtggttatagcaaagctgaccaagaaggcgatgaagagctttactttcattttaaatttccaggcaccaaaacctacattgaccctgaaacctatgaggacccaaatagagctgtccatcaattcgccaaggagctagatgcctcctgtattaaaattgagcgtgtgattggtgcaggagaattcggtgaagtctgcagtggccgtttgaaacttccagggaaaagagatgttgcagtagccataaaaaccctgaaagttggttacacagaaaaacaaaggagagactttttgtgtgaagcaagcatcatggggcagtttgaccacccaaatgttgtccatttggaaggggttgttacaagagggaaaccagtcatgatagtaatagagttcatggaaaatggagccctagatgcatttctcaggaaacatgatgggcaatttacagtcattcagttagtaggaatgctgagaggaattgctgctggaatgagatatttggctgatatgggatatgttcacagggaccttgcagctcgcaatattcttgtcaacagcaatctcgtttgtaaagtgtcagattttggcctgtcccgagttatagaggatgatccagaagctgtctatacaactactggtggaaaaattccagtaaggtggacagcacccgaagccatccagtaccggaaattcacatcagccagtgatgtatggagctatggaatagtcatgtgggaagttatgtcttatggagaaagaccttattgggacatgtcaaatcaagatgataatgttcgcttttctgtttcatttttatctaggccaataagccctcttctggatcaaaacactcctgatttcactaccttttgttcagttggagaatggctacaagctattaagatggaaagatataaagataatttcacggcagctggctacaattcccttgaatcagtagccaggatgactattgaggatgtgatgagtttagggatcacactggttggtcatcaaaagaaaatcatgagcagcattcagactatgagagcacaaatgctacatttacatggaactggcattcaagtgtgatatgcatttctcccttttaagggagattacagactgcaagagaacagtactggccttcagtatatgcatagaatgctgctagaagacaagtgatgtcctgggtccttccaacagtgaagagaagatttaagaagcacctatagacttgaactcctaagtgccaccagaatatataaaaagggaatttaggatccaccatcggtggccaggaaaatagcagtgacaataaacaaagtactacctgaaaaacatccaaacaccttgagctctctaacctcctttttgtcttatagactttttaaaatgtacataaagaatttaagaaagaatatatttgtcaaataaaatcatgatcttattgttaaaattaatgaaatattttccttaaatatgtgatttcagactattcctttttaaaatcatttgtgtttattcttcataaggactttgttttagaaagctgtttatagctttggacctttttagtgttaaatctgtaacattactacactgggtacctttgaaagaatctcaaatttcaaaagaaatagcatgattgaagatacatctctgttagaacattggtatcctttttgtgccattttattctgtttaatcagtgctgttttgatattgtttgctaattggcaggtagtcaagaaaatgcaagttgccaagagctctgatattttttaaaaagaatttttttgtaaagatcagacaacacactatcttttcaatgaaaaaagcaataatgatccatacatactataaggcacttttaacagattgtttatagagtgattttactagaaagaatttaataaactcgaagtttaggtttatgagtatataaacaaatgaggcacttcatctgaagaatgttggtgaaggcaagtctctgaaagcagaactatccagtgttatctaaaaattaatctgagcacatcaagattttttcattctcgtgacattaggaaatttaggataaatagttgacatatattttatatcctcttctgttgaatgcagtccaaacatgaaaggaaataattgttttatattataactctgaagcatgataaaggggcagttcacaattttcaccatttaaacacaaatttgctgcacagaatatcaccattgcagttcaaaacaaaacaaaacaaaaagtcttttgtttgtgaacactgatgcaagaaacttgttaaatgaaaggactctttaccctagaaggaagaggtgaaggatctggcttgtttttaaagctttatttattaaaccatattatttgattactgtgttagaatttcataagcaataattaaatgtgtctttatagatattgcaggaatgtatacatattgtgattaatgctttcaaaacttatgaaaatcatgaactaccccagaattgaactgttgtacttccaaagagaattgggctgtttataatgattttaatagagaaagatcccagggatcggtcataattggtcttgtttgataatgtgggcatccacaaacaaacaaacaaataacagaaacaaaatctgtaaatgttcctttgtaaaacttgtaaattttatttatactgtcttgntttgtacacacatttctctgtagtgggctctgaatacattgaaaatgcactatatttttctattttacttgcagagcatcacaaaaggaacaggtattttcaagtgctnccataatgggttttccccacatttagggaccnaaagaccg

SEQ ID NO: 17 - DNA, 1081 bp, Homo sapiens
  CDS (79)..(729)
cggcacgagaggcagcaactcaccctcactcagaggtcttctggttctggaaacaactctagctcagccttctccaccatgagcctcagacttgataccaccccttcctgtaacagtgcgagaccacttcatgccttgcaggtgctgctgcttctgtcattgctgctgactgctctggcttcctccaccaaaggacaaactaagagaaacttggcgaaaggcaaagaggaaagtctagacagtgacttgtatgctgaactccgctgcatgtgtataaagacaacctctggaattcatcccaaaaacatccaaagtttggaagtgatcgggaaaggaacccattgcaaccaagtcgaagtgatagccacactgaaggatgggaggaaaatctgcctggacccagatgctcccagaatcaagaaaattgtacagaaaaaattggcagaacccaagtcttcccagtactatcttagtttccgcaccgcagttcctcggtgtccacttcaggcttccggactggaaggacagccgggaataaaacgtgccggcgaggctcaggagtcattggccacagagacccagcccgagtttcccatcgcactgagcactgagatcctgctggaagctctgccgcagcatgagctccgcagccgggttctgcgcctcacgccccgggctgctgttcctggggttgctgctcctgccacttgtggtcgccttcgccagcgctgaagctgaaaaaaatggggacctgcagtgcctgtgtgtgaagaccacctcccaggtccgtcccaggcacatcaccagcctggaggtgatcaaggccggaccccactgccccactgcccaactgatagccacgctgaagaatggaaggaaaatttgcttggacctgcaagccccgctgtacaagaaaataattaagaaacttttggagagttagctactagctgcctacgtgtgtgcatttgctatatagcatacttcttttttccagtttcaatctaactgtgaaagaacttttgatatttgtgttatccttatgattttaaataaacaaaataaatcaaaaaaaaaaaaa

SEQ ID NO: 18 - DNA, 906 bp, Homo sapiens
  CDS (201)..(782)
ctgctcagaccgccttccttctctcattgccacccgtgccgaacagccaggctgcccaattgcaactgtagaccaatgaactaatccatcgcccgcagcccgactctcagcagcggttcgtcccggtgcccacccccgcgaagcggagcgcccgggcacctagcctccctgccggccacctagcctccctgccggccacgatgccgaacgtgctgctgccgcccaaggagagcaacctcttcaaacgcatcttgaaatgttatgaacagaagcagtacaaaaatggcctcaagttttgcaagatgattctgtcgaacccaaaatttgctgaacatggagagactttggctatgaaaggattaacactgaactgtttaggaaaaaaagaagaagcttatgagtttgttcgtaaaggacttcgtaatgatgtcaagagtcatgtctgttggcatgtatatggactcttgcagcgttctgataaaaaatatgatgaagctataaaatgttaccgaaatgccctcaaattagataaagataacctgcaaattttgagggatctctcactgttgcagatccaaatgagagaccttgaaggttaccgagagacaagataccagcttcttcagttgcgccccacacagcgtgcctcctggattggatatgctattgcataccatttgctgaaagattatgatatggccctaaattcttccaaaagaaatccagtgcatgtttggggaaccacagggaatccatggtgggtacataagaggagttttaggtgaggataacataaaaaaggaacataaaaaggtctgtatgtcattaatctgaataatggcggcaaatgtcaccatttaattcagtaattcttgcggacatctgtaaaggaagtcgacgcggccg

SEQ ID NO: 19 - DNA, 961 bp, Homo sapiens
  CDS (140)..(661)
cagcaagtgctccgtgcagggctgttgctatcacttggaggtgaacagcctcttttgccggtattcagtgaagaaagcaagtctaaatatgcagttctctcactggagtgaaagatgttttgttcatttctaatcaactatgctagacagctgcaagctgaaaagtgcctgcaatttgccatttatttgtaataagaaaataataaacactgctggaaccagtaatgcagaagtccccttggctgatcccggaatgtaccagctggacattacattaagaaggggtcaaagtttagctgctcgagatcgaggagggacgagtgatccatatgtgaagtttaaaatcggaggaaaagaagtttttagaagtaagataatacacaagaacctcaaccctgtgtgggaagaaaaagcttgtattctggttgatcatcttagggagccattgtatataaaggtatttgactatgattttggactacaggatgactttatgggctcagcctttctggatctgacacaattggagttaaacaggcccacagatgtgacccttactctgaaagatcctcattatcctgaccatgatcttggaatcattttgctctcagtcatccttacccctaaagaaggagagtccagtggatgtgacaatgctacatgaggacagacgttctggaacaagatcaagtaaaggaactttcagaaagatgacgtggttggatcttatttctctgtgaagtctctctttggaggacgtgcggaggccacgctcttcctgtactgggttctgccgagcagaggtcacgaatccttattgaaatgtacaaattcaaaccaaagtttaggctattcagaccttaacagaaattgatcttgggaggaatagcagatacctgatgagggaaaaccggccatggtcaaggtgaggcaccaatagatggtggtcaagaacagcata

SEQ ID NO: 20 - DNA, 1678 bp, Homo sapiens
  CDS (35)..(1003)
gctcgggacggggcgccgcggccgggcgggcagcatgaataaccctataccttccaatttgaaatcagaagcaaaaaaggctgccaaaatattaagagaattcacagaaataacttccagaaatggacctgataagatcattcctgctcacgtaattgcgaaggctaaaggccttgcaattctgtctgtgatcaaagccgggttcctggtgactgccagaggaggcagcgggattgtagtggcgcgccttccagatggaaaatggtctgcaccctcagccattgggatagctggccttggtggaggatttgaaataggaattgaggtatcagacttggtgataattctgaattatgaccgtgctgtagaagcttttgcaaaaggcggaaatctgaccctcggagggaacttgactgtggcggttgggcccttgggaaggaacttggaaggaaacgtggccctgagaagctccgctgccgtcttcacgtactgcaagtcaaggggactctttgcaggcgtgtctttagaagggagctgtttgattgaaaggaaagaaactaatagaaaattttattgtcaagatatccgagcttatgacattttatttggagatacaccgcggcctgctcaagccgaagatctttatgaaattcttgattcctttactgaaaagtatgaaaatgaaggacaacgaatcaatgcaagaaaagcagcaagggagcagaggaagtcttctgctaaagaattacctccaaagccattgtcaagaccacagcagtcatctgcaccagtccagctgaactctggctctcaaagcaatttgaatcaacccatagaagtgacagcgctgtattcatttgaaggacagcagcctggggatttgaattttcaagctggagacagaatcacagttatatcaaaaacagattcacattttgattggtgggaaggaaaacttcgaggtcaaactggcatttttccagccaactacgtaaccatgaattaaagcgtatactattttcttctttgagaattacaaaaaaattatttctacactgacaggatttactagttaagcaatgtttaatataaattttaaaaaacttctgttctacaaaatttccattccgtatgtaaaagattttgtttttctatataaaaagagctgactgacatatctttaaatactttgtactaactttatcacacttactgtgtcatagaatatcatacagtttatacgctcatagttctcttgtgaacacttcaaacatcgctaagcatttgatctggccatgtatatggtagctgtgttttaatttgagaatcttgagggtagagccacaaatttcaattcttacatttccatttgcaaagtgactagagaaaaagaaatcagcttaaatgaggtattaagtaatgtttagagtcgtaggtattaactagaatataaatccttagaaattgtctttataccttcaaaaattatactatgcatttatcatagaaatgtgattacaaagaagtctgactaccatgtctttaaacatatggcatctctcaacttttcttccttatggggctacatttgttcatttccagcagtagcataaacttacggtgacatggtagacttgtctctaaataaaatttttaaatgttaaaaaaaaaaaaaaaa

SEQ ID NO: 21 - DNA, 2918 bp, Homo sapiens
  CDS (908)..(2737)
atgcagtatagcacacaaaatgctgatttccaatctagccttttattggaagactgtgaagaagcttttctgaaaaaccctgaaggaaaacctcgattaatctttcatcgtttggaagatggaaaagtcagttctgactctgtccagcaattgattgatcaagtttctaatctaaacaagaccagcaaagccaaggacatactgggttttgagaacacagacttggagactaaggatttgggcagtgaggattccattccagaagaagatgattttggtgatgttctgtgggacatacatgatgaacaagagcaaatggaaacttttcagcaggcttctaattcagcccatgagttgggatttgagaaatattaccaacgccttaatgatctagtggcagcaccagccccgattccacctcttctcgtgtctggaggaccaggttctgggaagtctcttcttttatcaaagtggattcaattacaacagaagaattcccccaacacactgattctttcccattttgtgggaaggcccatgtcaaccagctcagagtcctccttgattattaaacgactaactctaaagttgatgcagcactcttggtcagtctctgctctgacactggatcctgctaagcttctggaagaatttccacgttggctggaaaaactctctgctcgtcatcaaggcagcatcatcatcgttattgattctatagatcaagttcaggttgtggcctacacttcatcttgatcccttaagtccaaaagatgcaaaatctattataattgcagaatgccactctgtagacattaaattgagtaaagagcaggagaagaagctagaacgacactgtcgttctgctacaacctgcaatgccctttatgtcacccttttcggcaaaatgatcgcgcgtgctgggagagcaggcaatttagataaaatccttcatcagtgtttccagtgtcaagatactctttcattatatagacttgttctgcactctatccgggagtccatggcaaatgatgtggataaagagctaatgaagcagatcctctgccttgtcaatgttagtcacaatggtgtgagtgaatcagaactgatggaactctatcctgagatgtcctggactttcttgacctcccttattcacagtttatacaaaatgtgtttgttgacttatggatgtggcttgcttaggtttcaacatctgcaggcttgggaaacagtgagattggagtacctggaaggccccactgttacttcttcatacaggcaaaagctaatcaactatttcaccttgcagctaagtcaggacagagtgacttggagaagtgcagatgaactcccgtggctttttcagcagcagggaagtaaacagaagctgcatgattgccttcttaatctctttgtgtctcaaaacctttataaaaggggacactttgctgagttgctgagttattggcagtttgttggcaaagacaaaagtgcaatggcaacagaatacttcgattcattgaagcagtatgagaaaaactgcgaaggcgaggacaacatgagttgcttagctgatctttatgaaaccttggggcgatttctcaaggatctaggccttctcagtcaggccatagtacctttgcagaggtctttagagattcgagaaacagctttagatcccgatcacccaagagtagcccagtccctccaccaactagcaagtgtatacgtgcagtggaagaagtttggcaatgcagaacaactgtataaacaggcgttggaaatctcagaaaatgcttatggtgcggaccatccatatactgctcgtgaacttgaagcacttgcaactttgtaccagaaacaaaataaatatgaacaagctgaacattttaggaaaaaatcctttaaaattcatcagaaagctataaagaaaaaaggcaacttgtacggatttgcccttttacgtagacgggctttacagttagaagagcttacattaggtaaggacacacctgataatgctcggaccctcaatgaactgggtgttctctactatcttcaaaataacctggaaacagctgaccagtttctgaagcgttccttagaaatgagggagcgagttctaggaccagatcaccctgactgtgctcagtctttgaataatctggcagctctatgcaatgaaaagaaacagtatgataaagcagaagaactttatgaaagagctttagatattcggagacgtgcattagctcctgatcacccttctttggcatatacggtgaagcatcttgccatcttgtataagaaaatggggaaacttgacaaagctgtacctttgtatgaattggctgttgaaattcgacagaaatcttttggcccaaagcaccctagtgtagctactgccttggtgaacttagctgttctttatagccaaatgaaaaaacacgttgaagctttgccattatatgaaagagcattaaagatttatgaagatagcctgggtcggatgcatcctcgagttggagaaacactgaaaaatttagctgtgcttagctatgaaggaggagattttgaaaaagctgctgaattatacaaaagggcaatggaaataaaagaagcagaaacatcactcttgggtggaaaagctccttcacgccattcatcaagtggagacacgtttagcttaaaaacagctcattctcctaatgttttccttcagcaaggacaaaggtaatagcagcagttagaattctttgcaaatgtaccttaagacaaaataattaaacatttggaacatttgaatttgaaactttaaaaaaatgttgtacgaaattttactacgtgtgatttaactgctatttgtatgaagttgtattggattacattaagttggaattgtgaaaaaaaaaaaa

SEQ ID NO: 22 - DNA, 2454 bp, Homo sapiens
  CDS (84)..(2141)
ctccgccgccgccaccgccgcctccgccgctgcctcaggagcggaacaacgtcggcgagcgggatgatgatgtgcctgcagatatggttgcagaagaatcaggtcctggtgcacaaaatagtccataccaacttcgtagaaaaactcttttgccgaaaagaacagcgtgtcccacaaagaacagtatggagggcgcctcaacttcaactacagaaaactttggtcatcgtgcaaaacgtgcaagagtgtctggaaaatcacaagatctatcagcagcacctgctgaacagtatcttcaggagaaactgccagatgaagtggttctaaaaatcttctcttacttgctggaacaggatctttgtagagcagcttgtgtatgtaaacgcttcagtgaacttgctaatgatccaattttgtggaaacgattatatatggaagtatttgaatatactcgccctatgatgcatcctgaacctggaaaattctaccagattaatccagaagagtatgaacatccaaatccctggaaagagagtttccagcagttgtataaaggtgcacatgtaaagccaggatttgctgaacatttctacagtaaccctgcaagatataaaggaagagaaaatatgttgtattatgatactattgaagatgcccttggtggggtacaagaggctcattttgatggacttatctttgttcattctggaatatatactgatgaatggatatatattgaatctccaatcaccatgattggtgcagcacctgggaaagtggcagacaaagttataattgaaaacactagagattcaaccttcgtttttatggaaggctctgaagatgcttatgttggatatatgacaataaggtttaaccctgatgacaaatctgcacaacaccacaatgcacaccactgcttagagattacagtaaattgtagccctattattgatcactgtatcatccgaagtacatgtacagttggttctgcagtatgtgttagtggtcaaggagcatgtcccaccatcaagcactgtaacatcagtgactgtgaaaatgttggactatatataacagatcatgcacagggaatatatgaggataatgaaatttccaataatgcgttagctgggatttgggttaaaaatcatggaaacccaattattagacggaatcatattcatcatggacgtgatgttggtgtgttcacatttgatcatggcatgggttactttgaaagttgcaatatacacagaaataggatagcaggctttgaagtaaaagcctatgctaaccctacagtggttcgatgtgaaattcaccatgggcagactggaggaatatatgtccatgaaaaaggaagaggacaattcatagagaataaaatctatgcaaacaactttgcaggtgtatggattacctcaaatagtgacccaacaataaggggaaattctatatttaatggaaatcaaggaggagtttacatctttggtgatggacgaggccttattgaaggaaatgacatttatggcaatgcattagcaggaattcaaattaggacaaacagttgtccaattgttcggcataacaaaattcatgatggccagcatggtgggatttatgtgcatgaaaagggacaaggagtaatagaagagaatgaagtttatagtaacactctagctggagtctgggtgacaactggcagcactccagtactgagaagaaaccggatacacagtggcaagcaggttggtgtttatttttatgacaatggacatggagtgctagaagacaatgatatctataatcatatgtattcaggggttcagataaggactggaagcaaccccaaaattagacgcaacaaaatctggggaggacagaatggtggaattctagtttataattctggtctaggctgtatagaagacaatgaaatatttgacaatgcaatggctggagtctggattaagacagatagtaatcctacactaagaagaaataaaatccatgatggaagagatggtggcatctgtatatttaatgggggtcgaggtattgttgttaattttgcattagtgaaaaatccagttttccattattcttccatatctttaatgatcaatgacattgctaactaagttataaatgagtgaatctcaagtctttttccttatcaagttgaactggtttaggagattagtgcctagagttaagagacaaatgtttacaatacttttccttttgtagccactttgagtctgcagttgtcagtaagcctttttaaagatagaatttgtttacattctctggaccttttaaaattcagaatagtaatatgattataataaacttcaaagtcaagttatagaaatagatgtgagaaattgatctgtaaatatctgaaaatgtctttagtaaacgggtattgcttttgtaaaaaaaaaaaaa

SEQ ID NO: 23 - DNA, 3332 bp, Homo sapiens
  CDS (1)..(2385)
atgccccaagtgacagccctcctggtggaggacaagaacctgggcagagctgatgcgatgctggagcagctgctcccagagctcaccgggctgctcagcctcctggaccacgagtacctcagcgataccaccctggaaaagaagatggccgtggcctccatcctgcagagcctgcagccccttccagctggcatgtcccccttcttcctcacagcaaaggaggtctcctacctgtatgtgaacacagcagacctccactcggggcccagcttcgtggaatccctctttgaagaatttgactgtgacctgagtgaccttcgggacatgccagaggatgatggggagcccagcaaaggagccagccctgagctagccaagagcccacgcctgagaaacgcggccgacctgcctccaccgctccccaacaagcctccccctgaggactactatgaagaggcccttcctctgggacccggcaagtcgcctgagtacatcagctcccacaatggctgcagcccctcacactcgattgtggatggctactatgaggacgcagacagcagctaccctgcaaccagggtgaacggcgagcttaagagctcctataatgactctgacgcaatgagcagctcctatgagtcctacgatgaagaggaggaggaagggaagagcccgcagccccgacaccagtggccctcagaggaggcctccatgcacctggtgagggaatgcaggatatgtgccttcctgctgcggaaaaagcgtttcgggcagtgggccaagcagctgacggtcatcagggaggaccagctcctgtgttacaaaagctccaaggatcggcagccacatctgaggttggcactggatacctgcagcatcatctacgtgcccaaggacagccggcacaagaggcacgagctgcgtttcacccagggggctaccgaggtcttggtgctggcactgcagagccgagagcaggccgaggagtggctgaaggtcatccgagaagtgagcaagccagttgggggagctgagggagtggaggtccccagatccccagtcctcctgtgcaagttggacctggacaagaggctgtcccaagagaagcagacctcagattctgacagcgtgggtgtgggtgacaactgttctacccttggccgccgggagacctgtgatcacggcaaagggaagaagagcagcctggcagaactgaagggctcaatgagcagggctgcgggccgcaagatcacccgtatcattggcttctccaagaagaagacactggccgatgacctgcagacgtcctccaccgaggaggaggttccctgctgtggctacctgaacgtgctggtgaaccagggctggaaggaacgctggtgccgcctgaagtgcaacactctgtatttccacaaggatcacatggacctgcgaacccatgtgaacgccatcgccctgcaaggctgtgaggtggccccgggctttgggccccgacacccatttgccttcaggatcctgcgcaaccggcaggaggtggccatcttggaggcaagctgttcagaggacatgggtcgctggctcgggctgctgctggtggagatgggctccagagtcactccggaggcgctgcactatgactacgtggatgtggagaccttaaccagcatcgtcagtgctgggcgcaactccttcctatatgcaagatcctgccagaatcagtggcctgagccccgagtctatgatgatgttccttatgaaaagatgcaggacgaggagcccgagcgccccacaggggcccaggtgaagcgtcacgcctcctcctgcagtgagaagtcccatcgtgtggacccgcaggtcaaagtcaaacgccacgcctccagtgccaatcaatacaagtatggcaagaaccgagccgaggaggatgcccggaggtacttggtagaaaaagagaagctggagaaagagaaagagacgattcggacagagctgatagcactgagacaggagaagagggaactgaaggaagccattcggagcagcccaggtacctatgtgggagcaaaattaaaggctctggaagaagccgtggccaccctggaagctcagtgtcgggcaaaggaggagcgccggattgacctggagctgaagctggtggctgtgaaggagcgcttgcagcagtccctggcaggagggccagccctggggctctccgtgagcagcaagcccaagagtggggaaactgcaaataaaccccagaacagcgttccagagcaacctctccctgtcaactgtgtctctgagctgaggaagaggagcccatccatcgtagcctccaaccaaggaagggtgctacagaaagccaaggaatgggaaatgaagaagacctaggaagaggatgaggatttcattccaaaggaaataccagcttgtccacctgaggaagaaatgcttttttcacaaggagacaccaagagaagactaggaagtagccctcgttctccagggcacccaaaataccagcctttattgtctgcatgattttaggggatatggggagggaacaagtagaagggaagagggaaatggagagcatccttatgactttacaaagggtggaaatgaggatggagggatacagaagtctgcacagctgtaaaggttttatagatgtctttgccttcccttctgaggaagggaagaagtaatgaaagcacatgtgaataaccccttccatcccattcacagcatcgcactcccagtccttaaggcaaagggaggcagtgctgaagcattggtggtgcagtgtaaagagacaagacctgatcatctgatcacacttgtgccaacttgattcatattgggcattactaacaacccctggtcaaggtaaataggttgaacaatcaataacattatccctgcctgcatacatgtgaacaaaagctatagaggacatgcaaattctacagtcattcctcatatgctttagacagagtgcagctactggaatcttccagatttcagtgttttaaaatcagagctctgaatacacaaaaggaaagagaaatggagcagctgacatattttaagctcacagtgatactcagtgacaggagcacagagctctaatgtccacaggatgttgtagggtagggtctctcagtaaatcaagtcccttacctatgttctgacactgaggctcttggagctatgggttagaaatccaggaggcaatgtctttattctaatgaagtcctcatcttgcactcagaggcccactagtttgcccttctatatattaagtaaaaccaagagaaattaaaaaaaaaaaa

SEQ ID NO: 24 - DNA, 1993 bp, Homo sapiens
  CDS (143)..(1369)
ccctctccagccaatccagtcagagcagcggagctgccccgaacaaagatggcgcgggaagcgtctgtgagggcagactgatccgagcacccaaaccctcggcggacagcggagccagtggtagccgcacggccctaaaaccatggaggagggcggcagcactggcagtgctggcagtgacagcagcaccagcgggagtggcggggcgcagcaaagggagctggagcgcatggctgaggtcttggtcaccggggaacagctacggctcaggctgcatgaagaaaaggttattaaagatagacgtcatcatctcaagacctacccaaactgttttgtcgcaaaagaactgattgactggctgattgaacacaaagaggcttctgacagagagacggcaattaaactcatgcagaaattagcagaccggggcattattcaccatgtgtgtgatgagcataaggaattcaaggatgtcaaactcttctaccgctttagaaaggatgacggcaccttcccattggataatgaagtgaaggcctttatgagaggacagaggctatatgaaaagctgatgagccctgaaaacacactcctgcagcccagggaggaggaaggggtcaagtatgagcgcaccttcatggcatctgaattcctggactggctggttcaggaaggtgaggccaccacgaggaaagaggcagagcagctttgccaccggcttatggagcatggcatcatccagcatgtgtccaacaagcacccatttgtggacagcaatcttctctaccagttcagaatgaacttccggcggaggcgaagactgatggagctgctcaatgaaaagtccccctcctcccaggaaactcatgacagtcccttctgcctgaggaagcagagccatgacaatcggaaatctaccagctttatgtcagtgagccccagcaaggagatcaagatcgtgtctgcagtgaggagaagcagcatgagcagctgtggcagcagcggctacttcagcagcagccccaccctcagcagcagcccccctgtgctctgcaaccccaagtccgtgctgaagagacctgtcacctctgaggaactccttactcccggggctccgtatgcaaggaagacattcacgattgttggtgacgcggttggctggggttttgtggtgcgaggaagtaagccatgccacatccaggctgtagaccccagtggccctgcagccgcagcaggaatgaaggtctgtcagtttgtcgtctctgtcaacgggctcaatgtcctgcatgtagactaccggaccgtgaacaatctgattctgacgggcccacggacgattgtcatggaagtcatggaggagttagagtgctgagctcctgggcctcccagccctccagtggcctgtgggtgagggaagccagaatgacacaaagcaatgcaaagacaagattgccatgcaaatggatggttttggacatacgagtcttctccgcacatacatgtctgaagttgagttttatacactgaatgtggaagaaccgggtatcatatcttttttaaaaaatgtcagtgtagaaaacatttgggaaaccattttcctacatgatagaactgccttactagatttctatttgtagctctcattcattgttttttatcttagtttgcagaaaggtgttgaaatgcttctctagcccaaacagcgacatgctaaagtccccttcttcagagtcaatagagtagttgttaaaggttttaaattgtactttctccaaaattagcatgcagctatttaatagggaatctagatttcaccaagattcaaatcaaagcaacatttaaaggaataagacctgttcactagcattttcaagggggttctaaagcattcaagtgcttaaaagccataaaaaatgacttcttaattcctgcctttagtgtcaacttttaagttaatacaggtttcaattgtggcattaggaaaaaaaaaaaa

SEQ ID NO: 25 - DNA, 2830 bp, Homo sapiens
  CDS (255)..(2051)
gggggcggggccgcgacgcgaggagcggagcaggaaggggcgaggcagccccgcccccggggcggtctcccgggacggccccgccccttgcccgcttccgcgtcagtgcctcaccaccacctgcccgcgcgccgccccatataaaggcgccgccgtccttgcccccaggactcggccccatggagacgccgccggccgccgctggcgcatggcgggtaggagctgtggcgcggggccttccaggagtctgagctatgagtggcccctgtggagagaagcctgtcctggaagccagccccaccatgagtctgtgggaatttgaggacagccacagccgtcagggcaccccaaggccgggtcaagagctggccgctgaggaggcctcggccctggaactgcagatgaaggtggacttcttccggaagctgggctattcatccacggagatccacagcgtcctgcagaagctgggcgtccaggcagacaccaacacggtgctgggtgagctggtgaaacacgggacagccaccgagcgggagcgccagacctcaccggacccctgccctcagctccctctagtcccgcggggtggtggcacccctaaggctcccaacctggagcctccactcccagaagaggaaaaggagggcagcgacctgagaccagtggtcatcgatgggagcaacgtggccatgagccatgggaacaaggaggtcttctcctgccggggcatcctgctggcagtgaactggtttctggagcggggccacacagacatcacagtgtttgtgccatcctggaggaaggagcagcctcggcccgacgtgcccatcacagaccagcacatcctgcgggaactggagaagaagaagatcctggtgttcacaccatcacgacgcgtgggtggcaagcgggtggtgtgctatgacgacagattcattgtgaagctggcctacgagtctgacgggatcgtggtttccaacgacacataccgtgacctccaaggcgagcggcaggagtggaagcgcttcatcgaggagcggctgctcatgtactccttcgtcaatgacaagtttatgccccctgatgacccactgggccggcacgggcccagcctggacaacttcctgcgtaagaagccactcactttggagcacaggaagcagccgtgtccctatggaaggaaatgcacctatgggatcaagtgccgattcttccacccagagcggccaagctgcccccagcgctctgtggcagatgagctccgtgccaatgctctcctctcaccccccagagccccaagcaaggacaaaaatggccggcggccttcaccttcatcccagtccagctctctgctaacagagagtgagcagtgcagcctggatgggaagaagctgggggcccaggcatccccagggtcccgccaagagggtctaacacagacctatgccccatcaggcaggagcctcgcacctagcgggggcagtggcagcagctttgggcccacagactggctcccacagacgctggactcactcccgtacgtctcccaggattgcctggactcgggcattggctccctggagagccagatgtcggaactttggggggttcgaggaggaggccctggtgagccgggcccaccccgagccccttacacgggctacagtccctatggatctgagctcccagccaccgcagccttctctgcctttggccgggccatgggtgctggccacttcagtgtccctgccgactacccacccgcgccccctgcctttccacctcgagagtactggtctgaaccatacccactgcccccacccacatcagtccttcaggagcccccagtgcagagcccaggggctggcaggagcccgtggggcagggcaggcagcctggccaaggagcaggccagcgtgtatactaagctgtgtggtgtgtttcccccgcacctggtggaggctgtgatggggcgcttcccacagctcctggacccccagcagctggctgccgagatcctctcctacaagtcccagcaccccagtgagtaagctgcctgtggctggcaagggcagcacccccagcctccaagggccgtcaggctgggctttgggccattgagcagcccattcccagccctgaggcccaccccagaggctggacagagggaggattcaagtcgggaaggaaacccacaaaccaaagatactgtaggattggttctggcccatgcagcacctctagctgtctgcctcagtgggtcagaagcgatcaccctgttgatacacattgtatctctgtagtttcaggagacgctgccggtaacggcgtcggtccgtggctgaggcccaaaccgtcttttctctcagagggtggggagggaggtgggggcagcagaggcctgggctgggtgccctgtgcacgccaccccacttccgccctacccctgggacgttggccttggctggctagttgggcaccgtgtgcctgccctccaagggcctcctctacgccaatgaggcctcatctgtgctctcgctgggcacgtggcttcatgtcagtaagcaagatgcttcttaataacccaccttctgccccactctattccttatcctgctgcccctgtaggggtcaagggccctccgtctacaccctcttcttctcctccatcctttattcagagtcatctcgcccttccccatgggtgggggaacctgtgtttgtttgtgtgcacatgtaaattttaaatattttaagcagaaagtccttacctcctgtaacacatcaataaagtacaatcattgtgagccctttcaaaaaaaaaaaa

SEQ ID NO: 26 - DNA, 6980 bp, Homo sapiens
  CDS (433)..(4485)
ccgagccctgaggcaggcggcggcggaggagccctcaaggcgagcagcgcgcgcgcggctgccgcgggactgctgcgggaggcgggcagcgggggccgcgagcgggcggactggcggcggcggcagctgcgcaaagtgcggagtgtggagctggaccagctgcctgagcagccgctcttccttgccgcctcaccgccggcctcctcgacttccccgtcgccggagcccgcggacgcagcggggagtgggaccggcttccagcctgtggcggtgccgccgccccacggagccgccagccggcgcggcgcccaccttaccgagtcggtggcggcgccggacagcggcgcctcgagtcccgcagcggccgagcccggggagaagcgggcgcccgccgccgagccgtctcctgcagcggcccccgccggtcgtgagatggagaataaagaaactctcaaagggttgcacaagatggatgatcgtccagaggaacgaatgatcagggagaaactgaaggcaacctgtatgccagcctggaagcacgaatggttggaaaggagaaataggcgagggcctgtggtggtaaaaccaatcccagttaaaggagatggatctgaaatgaatcacttagcagctgagtctccaggagaggtccaggcaagtgcggcttcaccagcttccaaagggccgacgcagtccttctcctgcaactccccatcaggtcgcacagtgaaatcagaatctccaggagtaaggagaaaaagagtttccccagtgccttttcagagtggcagaatcacaccaccccgaagagccccttcaccagatggcttctcaccatatagccctgaggaaacaaaccgccgtgttaacaaagtgatgcgggccagactgtacttactgcagcagatagggcctaactctttcctgattggaggagacagcccagacaataaataccgggtgtttattgggcctcagaactgcagctgtgcacatggaacattctgtattcatctgctatttgtgatgctccgggtgtttcaactagaaccttcagacccaatgttatggagaaaaactttaaagaattttgaggttgagagtttgttccagaaatatcacagtaggcgtagctcaaggatcaaagctccatctcgtaacaccatccagaagtttgtttcacgcatgtcaaattctcatacattgtcatcatctagtacttctacatctagttcagaaaacagcataaaggatgaagaggaacagatgtgtcctatttgcttgttgggcatgcttgatgaagaaagtcttacagtgtgtgaagacggctgcaggaacaagctgcaccaccactgcatgtcaatttgggcagaagagtgtagaagaaatagagaacctttaatatgtcccctttgtagatctaagtggagatctcatgatttctacagccacgagttgtcaagtcctgtggattccccttcttccctcagagctgcacagcagcaaaccgtacagcagcagcctttggctggatcacgaaggaatcaagagagcaattttaaccttactcattatggaactcagcaaatccctcctgcttacaaagatttagctgagccatggattcaggtgtttggaatggaactcgttggctgcttattttctagaaactggaatgtgagagagatggccctcaggcgtctttcccatgatgtcagtggggccctgctgttggcaaatggggagagcactggaaattctgggggcagcagtggaagcagcccgagtgggggagccaccagtgggtcttcccagaccagtatctcaggagatgtggtggaggcatgctgcagcgttctgtcaatggtctgtgctgaccctgtctacaaagtgtacgttgctgctttaaaaacattgagagccatgctggtatatactccttgccacagtttagcggaaagaatcaaacttcagagacttctccagccagttgtagacaccatcctagtcaaatgtgcagatgccaatagccgcacaagtcagctgtccatatcaacactgttggaactgtgcaaaggccaagcaggagagttggcagttggcagagaaatactaaaagctggatccattggtattggtggtgttgattatgtcttaaattgtattcttggaaaccaaactgaatcaaacaattggcaagaacttcttggccgcctttgtcttatagatagactgttgttggaatttcctgctgaattttatcctcatattgtcagtactgatgtttcacaagctgagcctgttgaaatcaggtataagaagctgctgtccctcttaacctttgctttgcagtccattaataattcccactcaatggttggcaaactttccagaaggatctacttgagttctgcaagaatggttactacagtaccccatgtgttttcaaaactgttagaaatgctgagtgtttccagtgtttccactcacttcaccaggatgcgtcgccgtttgatggcttatgcagatgaggtggaaattgccgaagccatccagttgggcgtagaagacactttacaacgacaacaacacaacagcttttgcaggcatctgttcccaacaactatctggaaaccacagagaacagttccccttgagtgcacagtccatttagagaaaactggaaaaggattatgtgctacaaaattgagtgccagttcagaggacatttctgagagactggccaggatttcagtaggaccttctagttcaacaacaacaacaacaacaacaacagagcaaccaaagccaatggttcaaacaaaaggcagaccccacagtcagtgtttgaactcctctcctttatctcatcattcccaattaatgtttccagccttgtcaaccccttcttcttctaccccatctgtaccagctggcactgcaacagatgtctctaagcatagacttcagggattcattccctgcagaataccttctgcatctcctcaaacacagcgcaagttttctctacaattccacagaaactgtcctgaaaacaaagactcagataaactttccccagtctttactcagtcaagacccttgccctccagtaacatacacaggccaaagccatctcgacctaccccaggtaatacaagtaaacagggagatccctcaaaaaatagcatgacacttgatctgaacagtagttccaaatgtgatgacagctttggcttgagcagcaatagtagtaattgctgttataccagtgacgagacagtgttcaccccagtagaggagaaatgcagattagatgtcaatacagagctcaactccagtattgaggaccttcttgaagcatctatgccttcaagtgatacaacagtaacttttaagtcagaagttgctgtcctgtctcctgaaaaggctgaaaatgatgatacctacaaagatgatgtgaatcataatcaaaagtgcaaagagaagatggaagctgaagaagaagaagctttagcaattgccatggcaatgtcagcgtctcaggtagccctccccatagttcctcagctgcaggttgaaaatggagaagatatcatcattattcaacaggatacaccagagactctaccaggacataccaaagcaaaacaaccgtatagagaagacactgaatggctgaaaggtcaacagataggccttggagcattttcttcttgttatcaggctcaagatgtgggaactggaactttaatggctgttaaacaggtgacttatgtcagaaacacatcttctgagcaagaagaagtagtagaagcactaagagaagagataagaatgatgagccatctgaatcatccaaacatcattaggatgttgggagccacgtgtgagaagagcaattacaatctcttcattgaatggatggcagggggatcggtggctcatttgctgagtaaatatggagccttcaaagaatcagtagttattaactacactgaacagttactccgtggcctttcgtatctccatgaaaaccaaatcattcacagagatgtcaaaggtgccaatttgctaattgacagcactggtcagagactaagaattgcagattttggagctgcagccaggttggcatcaaaaggaactggtgcaggagagtttcagggacaattactggggacaattgcatttatggcacctgaggtactaagaggtcaacagtatggaaggagctgtgatgtatggagtgttggctgtgctattatagaaatggcttgtgcaaaaccaccatggaatgcagaaaaacactccaatcatcttgctttgatatttaagattgctagtgcaactactgctccatcgatcccttcacatttgtctcctggtttacgagatgtggctcttcgttgtttagaacttcaacctcaggacagacctccatcaagagagctactgaagcatccagtctttcgtactacatggtagccaattatgcagatcaactacagtagaaacaggatgctcaacaagagaaaaaaaacttgtggggaaccacattgatattctactggccatgatgccactgaacagctatgaacgaggccagtggggaacccttacctaagtatgtgattgacaaatcatgatctgtacctaagctcagtatgcaaaagcccaaactagtgcagaaactgtaaactgtgcctttcaaagaactggccctaggtgaacaggaaaacaatgaagtttgcatgactaaattgcagaagcataattttatttttttggagcactttttcagcaatattagcggctgaggggctcaggatctattttaatatttcaattattcttccatttcatatagtgatcacaagcagggggttctgcaattccgttcaaattttttgtcactggctataaaatcagtatctgcctcttttaggtcagagtatgctatgagtagcaatacatacatatatttttaaaagttgatacttctttatgacccacagttgacctttattttcttaaataccagggcagttgtggctcattgtgcattttactgttggcccattcatttcgtttttggaaattatggttttgtattttcatgtttatttacattcatttttgtttattcagggaaagctgatctttttttcaaaccagaaaaaaaaaatgaactagatatgaagtagagttcattaaatatcttgctattgtcagagtttttaaaatatagacttaattttgtttttttaaattggaatacaataaagtactacctacatttgagtcagtcaccactcttattgtgcaggttaagtacaagttaactaaaaataaactgtcctctctggtgcaactcacaaccaagatcaagattaccttaaaatttatttgaattttttagatgttttggttgtcaaactgtaggaaacttcacaacatttaagtcttactctgtatgtaacaatccatcattcaccttcactactggtaataacatagagctgccattttccttttaccatgcatcatctctttacagtaggcctggcagatcattttttaaaaagattattcaactaccaatcagtaatgtttttaaacagtacatttgctttgaacttggaaaatgtgttcagaaagaaaaatggaattgaatttcatttatacactaattccttggattttgcacagttacctaacggttttagtctggagttaaattcagatgcatggaatcctgaaggaaaatggtagctttttaatctttttgtgtgtgtgtgagtcttttaaatcaagtactgattaactattaagtacaactttgagattttagttttaactcttcagaagccagtgtgaaatagaattggttattctcaaagactcaggataaactaaataagctatatatagagtacatttaaaatgtacaacacaaattggaaataaaataagttacaagataagtttacagggatatattgcttacaatttttaaaaggcagtttgttttttatgtgaatatgtttcttagtgaaattttacattcctttgttttggaagattggcgatatttgaagagttaaaaatagtacagaaatgtgaagtttggtatctctaaatgtgttgtacttgactttcttttttattttttttttttttttttgactacttagaattttcacaattctaataagattgtttccaagtctctcatgtgcaagctttaaaggatgcactcttgccattttatgtactggaagatcattggtcagatgaatactgtgtctgacaaaaatgtaaactgtataaactgaggaacctcagctaatcagtattactttgtagatcaccatgcccaccacatttcaaactcaaactatctgtagatttcaaaatccattgtgtttgagtttgtttgcagttccctcagcttgctggtaattgtggtgttttgttttttgttttgttttcaatgcaaatgtgatgtaatattcttattttctttggatcaaagctggactggaaattgtatcgtgtaattatttttgtgttcttaatgttatttggtactcaagttgtaaataacgtctactactgtttattccagtttctactacctcaggtgtcctatagatttttcttctaccaaagttcactttcacaatgaaattatatttgctgtgtgactatgattcctaagatttccagggcttaagggctaacttctattagcaccttactgtgtaagcaaatgttacaaaaaaaaaaaaaaaaaaaatctctgggttaagaaaatttggcttaaatgtatcctttgttattttaaatatattgagatattttaattaaaatttttaccccattgaaccgattttatagtatttgtacctattttggtgtttttgtctttatagtaaataaaagtttttgaacaaaaaaaaaaaaaaaaaagcatt

SEQ ID NO: 27 - DNA, 2328 bp, Homo sapiens
  CDS (76)..(2325)
cacgaggccggcccaggcccgcgcccgccgcggccctgagaggccccggcaggtcccggcccggcggcggcagccatggccggggggccgggcccgggggagcccgcagcccccggcgcccagcacttcttgtacgaggtgccgccctgggtcatgtgccgcttctacaaagtgatggacgccctggagcccgccgactggtgccagttcgccgccctgatcgtgcgcgaccagaccgagctgcggctgtgcgagcgctccgggcagcgcacggccagcgtcctgtggccctggatcaaccgcaacgcccgtgtggccgacctcgtgcacatcctcacgcacctgcagctgctccgtgcgcgggacatcatcacagcctgcaccactgccccgaggcccagcagcatccctgcacccgccgaggccgaggcctggagcccccggaagttgccatcctcagcctccaccttcctctccccagcttttccaggctcccagacccattcagggcctgagctcggcctggtcccaagccctgcttccctgtggcctccaccgccatctccagccccttcttctaccaagccaggcccagagagctcagtgtccctcctgcagggagcccgcccctttccgttttgctggcccctctgtgagatttcccggggcacccacaacttctcggaggagctcaagatcggggagggtggctttgggtgcgtgtaccgggcggtgatgaggaacacggtgtatgctgtgaagaggctgaaggagccctcattctggcgtagggtccctggccccttggtggttctgggcctcgggtggcactggtggcccgaaggccttcgcttcgagagcctcacgctgcccgtcttccctgccccttcccccaccgcaccctgggggctgcagaacgctgacctggagtggactgcagtgaagcagagcttcctgaccgaggtggagcagctgtccaggtttcgtcacccaaacattgtggactttgctggctactgtgctcagaacggcttctactgcctggtgtacggcttcctgcccaacggctccctggaggaccgtctccactgccagcgactggacatccttctgggtacagcccgggcaattcagtttctacatcaggacagccccagcctcatccatggagacatcaagagttccaacgtccttctggatgagaggctgacacccaagctgggagactttggcctggcccggttcagccgctttgccgggtccagccccagccagagcagcatggtggcccggacacagacagtgcggggcaccctggcctacctgcccgaggagtacatcaagacgggaaggctggctgtggacacggacaccttcagctttggggtggtagtgctagagaccttggctggtcagagggctgtgaagacgcacggtgccaggaccaagtatctgaaagacctggtggaagaggaggctgaggaggctggagtggctttgagaagcacccagagcacactgcaagcaggtctggctgcagatgcctgggctgctcccatcgccatgcagatctacaagaagcacctggaccccaggcccgggccctgcccacctgagctgggcctgggcctgggccagctggcctgctgctgcctgcaccgccgggccaaaaggaggcctcctatgacccaggtgtacgagaggctagagaagctgcaggcagtggtggcgggggtgcccgggcattcggaggccgccagctgcatccccccttccccgcaggagaactcctacgtgtccagcactggcagagcccacagtggggctgctccatggcagcccctggcagcgccatcaggagccagtgcccaggcagcagagcagctgcagagaggccccaaccagcccgtggagagtgacgagagcctaggcggcctctctgctgccctgcgctcctggcacttgactccaagctgccctctggacccagcacccctcagggaggccggctgtcctcagggggacacggcaggagaatcgagctgggggagtggcccaggatcccggcccacagccgtggaaggactggcccttggcagctctgcatcatcgtcgtcagagccaccgcagattatcatcaaccctgcccgacagaagatggtccagaagctggccctgtacgaggatggggccctggacagcctgcagctgctgtcgtccagctccctcccaggaaataggaagccccagcaggaattttccatcccaggcttgggcctggaacaggacaggcaggggcccgaagaaagtgatgaatttcagagctga

SEQ ID NO: 28 - DNA, 4616 bp, Homo sapiens
  CDS (1)..(4578)
atgttgagccgggtgggagcccaaacagcagggggcccacaggaggccggcccaggcagcctcgcgtccacttaccaggccaggcccaggcacgtccccagcgacagcaggctcaggcacgttcgggggtctgcccagcccccgcctccgctgctccgggccacgggggtcttcccgccctcgctccgcttcccgggctccgcagcaggggctcccttgggccccgacttcttccggctcttcacctcagacatgtctggagaccctaggacgacaagcccagggcagcttcttcaccagggggagcaggacgtggccgccttggcgttcgtgggaaccctgggcggtgaccgcgccccctcacagacttggcaccgcccagagcccagccccttccctctccccggcatcctcgttgcttcactgagtctttcagctgccagctccatagttcccctaggagaggtgggcggcgacctcaacccacagcgccttccactgcgatattgctccaaatccgaggaaattcaaactcccgggcgcgcgcaggccgacgggacccgaggaggaggggcaggacgaaggggcgggcacttctacgcgcgcgggcatgagccgtggcaggagtgcgcggcggcagcggtggccgccccttggggcttggggtgtgtttatttgcataagcgggcgcgcgccgtccgggctgggtggatccggcgggatttgactgctccgctgtccagaggcggagaagaagaggtagcgagtggacgtgactgctctatcccgggcaaaagggatagaaccagaggtggggagtctgggcagtcggcgacccgcgaagacttgaggtgccgcagcggcatccggagtagcgccgggctccctccggggtgcagccgccgtcgggggaagggcgccacaggccgggaagacctcctccctttgtgtccagtagtggggtccaccggagggcggcccgtgggccgggcctcaccgcggcgctccgggactgtgggagaagctctggaaaaggacatcaagacatcctacatcatggatcacatgattagtgatggatttttaacaatatcagaagaggaaaaagtaagaaatgagcccactcaacagcaaagagcagctatgctgattaaaatgatacttaaaaaagataatgattcctacgtatcattctacaatgctctactacatgaaggatataaagatcttgctgcccttctccatgatggcattcctgttgtctcttcttccagtgtaaggacagtcctgtgtgaaggtggagtaccacagaggccagttgtttttgtcacaaggaagaagctggtgaatgcaattcagcagaagctctccaaattgaaaggtgaaccaggatgggtcaccatacatggaatggcaggctgtgggaagtctgtattagctgcagaagctgttagagatcattcccttttagaaggttgtttcccagggggagtgcattgggtttcagttgggaaacaagacaaatctgggcttctgatgaaactgcagaatctttgcacacggttggatcaggatgagagtttttcccagaggcttccacttaatattgaagaggctaaagaccgtctccgcattctgatgcttcgcaaacacccaaggtctctcttgatcttggatgatgtttgggactcttgggtgttgaaagcttttgacagtcagtgtcagattcttcttacaaccagagacaagagtgttacagattcagtaatgggtcctaaatatgtagtccctgtggagagttccttaggaaaggaaaaaggacttgaaattttatccctttttgttaatatgaagaaggcagatttgccagaacaagctcatagtattataaaagaatgtaaagtatctttaattggtgcacttttacgtgattttcccaatcgctgggagtactacctcaaacagcttcagaataagcagtttaagagaataaggaaatcttcgtcttatgattatgaggctctagatgaagccatgtctataagtgttgaaatgctcagagaagacatcaaagattattacacagatctttccatccttcagaaggacgttaaggtgcctacaaaggatctacataagaagataatcactcagtttcagagatatcaccagccgcatactctttcaccagatcaggaagactgtatgtattggtacaactttctggcctatcacatggccagtgccaagatgcacaaggaactttgtgctttaatgttttccctggattggattaaagcaaaaacagaacttgtaggccctgctcatctgattcatgaatttgtggaatacagacatatactagatgaaaagccatttcctaatattgtacaactgggtctctgtgagccggaaacttcagaagtttatcagcaagctaagctgcaggccaagcaggaggtcgataatggaatgctttacctggaatggataaacaaaaaaaacatcacgaatctttcccgcttagttgtccgcccccacacagatgctgtttaccatgcctgcttttctgaggatggtcagagaatagcttcttgtggagctgataaaaccttacagctgcaggctcgggcctccggctccacagagcaggcaggaccccttccccctggtgcagctgtagctgcccaagcggtggctgcagactcaggcatccctgtactcttgggggacctggaaggaccccctgcccttgtgttcaaagctgaaacaggagagaaacttctagaaatcaaggctcatgaggatgaagtgctttgttgtgcattctctacagatgacagatttatagcaacctgctcagtggataaaaaagtgaagatttggaattctatgactggggaactagtacacacctatgatgagcactcagagcaagtcaattgctgccatttcaccaacagtagtcatcatcttctcttagccactgggtcaagtgactgcttcctcaaactttgggatttgaatcaaaaagaatgtcgaaataccatgtttggtcatacaaattcagtcaatcactgcagattttcaccagatgataagcttttggctagttgttcagctgatggaaccttaaagctttgggatgcgacatcagcaaatgagaggaaaagcattaatgtgaaacagttcttcctaaatttggaggaccctcaagaggatatggaagtgatagtgaagtgttgttcgtggtctgctgatggtgcaaggataatggtggcagcaaaaaataaaatctttctttttgacattcatactagtggcctattgggagaaatccacacgggccatcacagcaccatccagtactgtgacttctccccacaaaaccatttggcagtggttgctttgtcccagtactgtgtagagttgtggaatacagactcacgttcaaaggtggctgattgcagaggacatttaagttgggttcatggtgtgatgttttctcctgatggatcatcatttttgacatcttctgatgaccagacaatcaggctctgggagacaaagaaagtatgtaagaactctgctgtaatgttaaagcaagaagtagatgttgtgtttcaagaaaatgaagtgatggtccttgcagttgaccatataagacgtctgcaactcattaatggaagaacaggtcagattgattatctgactgaagctcaagttagctgctgttgcttaagtccacatcttcagtacattgcatttggagatgaaaatggagccattgagattttagaacttgtaaacaatagaatcttccagtccaggtttcagcacaagaaaactgtatggcacatccagttcacagccgatgagaagactcttatttcaagttctgatgatgctgaaattcaggtatggaattggcaattggacaaatgtatctttctacgaggccatcaggaaacagtgaaagactttagactcttgaaaaattcaagactgctttcttggtcatttgatggaacagtgaaggtatggaatattattactggaaataaagaaaaagactttgtctgtcaccagggtacagtactttcttgtgacatttctcacgatgctaccaagttttcatctacctctgctgacaagactgcaaagatctggagttttgatctccttttgccacttcatgaattgaggggccacaacggctgtgtgcgctgctctgccttctctgtggacagtaccctgctggcaacgggagatgacaatggagaaatcaggatatggaatgtctcaaacggtgagcttcttcatttgtgtgctccgctttcagaagaaggagctgctacccatggaggctgggtgactgacctttgcttttctccagatggcaaaatgcttatctctgctggaggatatattaagtggtggaacgttgtcactggggaatcctcacagaccttctacacaaatggaaccaatcttaagaaaatacacgtgtcccctgacttcaaaacatatgtgactgtggataatcttggtattttatatattttacagactttagaataaaatagttaagcattaaaaaaaaaaaaaaaaaaacc

SEQ ID NO: 29 - DNA, 3635 bp, Homo sapiens
  CDS (1)..(3597)
atggatgcaaaagctcgaaattgtttgcttcaacatagagaagctctggaaaaggacatcaagacatcctacatcatggatcacatgattagtgatggatttttaacaatatcagaagaggaaaaagtaagaaatgagcccactcaacagcaaagagcagctatgctgattaaaatgatacttaaaaaagataatgattcctacgtatcattctacaatgctctactacatgaaggatataaagatcttgctgcccttctccatgatggcattcctgttgtctcttcttccagtgtaaggacagtcctgtgtgaaggtggagtaccacagaggccagttgtttttgtcacaaggaagaagctggtgaatgcaattcagcagaagctctccaaattgaaaggtgaaccaggatgggtcaccatacatggaatggcaggctgtgggaagtctgtattagctgcagaagctgttagagatcattcccttttagaaggttgtttcccagggggagtgcattgggtttcagttgggaaacaagacaaatctgggcttctgatgaaactgcagaatctttgcacacggttggatcaggatgagagtttttcccagaggcttccacttaatattgaagaggctaaagaccgtctccgcattctgatgcttcgcaaacacccaaggtctctcttgatcttggatgatgtttgggactcttgggtgttgaaagcttttgacagtcagtgtcagattcttcttacaaccagagacaagagtgttacagattcagtaatgggtcctaaatatgtagtccctgtggagagttccttaggaaaggaaaaaggacttgaaattttatccctttttgttaatatgaagaaggcagatttgccagaacaagctcatagtattataaaagaatgtaaagtatctttaattggtgcacttttacgtgattttcccaatcgctgggagtactacctcaaacagcttcagaataagcagtttaagagaataaggaaatcttcgtcttatgattatgaggctctagatgaagccatgtctataagtgttgaaatgctcagagaagacatcaaagattattacacagatctttccatccttcagaaggacgttaaggtgcctacaaaggatctacataagaagataatcactcagtttcagagatatcaccagccgcatactctttcaccagatcaggaagactgtatgtattggtacaactttctggcctatcacatggccagtgccaagatgcacaaggaactttgtgctttaatgttttccctggattggattaaagcaaaaacagaacttgtaggccctgctcatctgattcatgaatttgtggaatacagacatatactagatgaaaagccatttcctaatattgtacaactgggtctctgtgagccggaaacttcagaagtttatcagcaagctaagctgcaggccaagcaggaggtcgataatggaatgctttacctggaatggataaacaaaaaaaacatcacgaatctttcccgcttagttgtccgcccccacacagatgctgtttaccatgcctgcttttctgaggatggtcagagaatagcttcttgtggagctgataaaaccttacagctgcaggctcgggcctccggctccacagagcaggcaggaccccttccccctggtgcagctgtagctgcccaagcggtggctgcagactcaggcatccctgtactcttgggggacctggaaggaccccctgcccttgtgttcaaagctgaaacaggagagaaacttctagaaatcaaggctcatgaggatgaagtgctttgttgtgcattctctacagatgacagatttatagcaacctgctcagtggataaaaaagtgaagatttggaattctatgactggggaactagtacacacctatgatgagcactcagagcaagtcaattgctgccatttcaccaacagtagtcatcatcttctcttagccactgggtcaagtgactgcttcctcaaactttgggatttgaatcaaaaagaatgtcgaaataccatgtttggtcatacaaattcagtcaatcactgcagattttcaccagatgataagcttttggctagttgttcagctgatggaaccttaaagctttgggatgcgacatcagcaaatgagaggaaaagcattaatgtgaaacagttcttcctaaatttggaggaccctcaagaggatatggaagtgatagtgaagtgttgttcgtggtctgctgatggtgcaaggataatggtggcagcaaaaaataaaatctttctttttgacattcatactagtggcctattgggagaaatccacacgggccatcacagcaccatccagtactgtgacttctccccacaaaaccatttggcagtggttgctttgtcccagtactgtgtagagttgtggaatacagactcacgttcaaaggtggctgattgcagaggacatttaagttgggttcatggtgtgatgttttctcctgatggatcatcatttttgacatcttctgatgaccagacaatcaggctctgggagacaaagaaagtatgtaagaactctgctgtaatgttaaagcaagaagtagatgttgtgtttcaagaaaatgaagtgatggtccttgcagttgaccatataagacgtctgcaactcattaatggaagaacaggtcagattgattatctgactgaagctcaagttagctgctgttgcttaagtccacatcttcagtacattgcatttggagatgaaaatggagccattgagattttagaacttgtaaacaatagaatcttccagtccaggtttcagcacaagaaaactgtatggcacatccagttcacagccgatgagaagactcttatttcaagttctgatgatgctgaaattcaggtatggaattggcaattggacaaatgtatctttctacgaggccatcaggaaacagtgaaagactttagactcttgaaaaattcaagactgctttcttggtcatttgatggaacagtgaaggtatggaatattattactggaaataaagaaaaagactttgtctgtcaccagggtacagtactttcttgtgacatttctcacgatgctaccaagttttcatctacctctgctgacaagactgcaaagatctggagttttgatctccttttgccacttcatgaattgaggggccacaacggctgtgtgcgctgctctgccttctctgtggacagtaccctgctggcaacgggagatgacaatggagaaatcaggatatggaatgtctcaaacggtgagcttcttcatttgtgtgctccgctttcagaagaaggagctgctacccatggaggctgggtgactgacctttgcttttctccagatggcaaaatgcttatctctgctggaggatatattaagtggtggaacgttgtcactggggaatcctcacagaccttctacacaaatggaaccaatcttaagaaaatacacgtgtcccctgacttcaaaacatatgtgactgtggataatcttggtattttatatattttacagactttagaataaaatagttaagcattaaaaaaaaaaaaaaaaaaacc

SEQ ID NO: 30 - DNA, 765 bp, Homo sapiens
  CDS (86)..(343)
aggattggctgttagcggcgttgtagttaagctcgtgtaacggcggcggtgtcggcagctgctgtagcgaagagagtttggcgcgatgtctcacaccattttgctggtacagcctaccaagaggccagaaggcagaacttatgctgactacgaatctgtgaatgaatgcatggaaggtgtttgtaaaatgtatgaagaacatctggatttcatcgatgatctggcagacctcagctgcctggtttaccgagctgatacccagacataccagccttataacaaagactggattaaagagaagatctacgtgctccttcgtcggcaggcccaacaggctgggaaataattgtgttggaagcactgggggggttggggtgggcttggaacacaggtgtgtacagcgtgctgtagtggaagttttgtatcatagtaatcctgtttccactttgttatactctagccaagattgactgtattagatgaaatgtgaggatcttgttcaatcggaaacccccgttacctcctctttttctttctctttctttttttttttttacttaaacatttttatgatgatttagatggaagttgttcttcgtcacttaatgttggttccagtccttcaactgttcatatctactttataacattcacatactaacccttcttcaagatggggtggggggtggaaatgcagtttagccatgtcctcaagataaagtcttggtaaaaataaataaatgtcctttagttataaaaaaaaaa

SEQ ID NO: 31 - DNA, 2373 bp, Homo sapiens
  CDS (181)..(2187)
tttattaagctccgaaatagtaatcttttggctcgacgccgaggaattccagaatgcattctgttggtcactcagcgtattacaaaataccctgtcttggtggaaaggatattgcagtacacaaaggaaagaactgaggaacataaagacttacgcaaagcgctttgcttaattaaagacatgattgcaacagtggatttaaaagtcaatgaatatgagaaaaaccaaaaatggcttgagatcctaaataagattgaaaacaaaacatacacgaagctcaaaaatggacatgtgtttaggaagcaggcactgatgagtgaagaaaggactctgttatatgatggccttgtttactggaaaactgctacaggtcgtttcaaagatatcctagctctacttctaactgatgtgctgctctttttacaagaaaaagaccagaaatacatctttgcagccgttgatcagaagccatcagttatttcccttcaaaagcttattgctagagaagttgctaatgaggagagaggaatgtttctgatcagtgcttcatctgctggtcctgagatgtatgaaattcacaccaattccaaggaggaacgcaataactggatgagacggatccagcaggctgtagaaagttgtcctgaagaaaaagggggaaggacaagtgaatctgatgaagacaagaggaaagctgaagccagagtggccaaaattcagcaatgtcaagaaatactcactaaccaagaccaacaaatttgtgcgtatttggaggagaagctgcatatctatgctgaacttggagaactgagcggatttgaggacgtccatctagagccccacctccttattaaacctgacccaggcgagcctccccaggcagcctcattactggcagcagcactgaaagaagctgagagcctacaagttgcagtgaaggcctcacagatgggcgccgtgagtcaatcatgtgaggacagttgtggagactctgtcttggcggacacactcagttctcatgatgtaccaggatcaccgactgcctcattagtcacaggagggagagaaggaagaggctgttcggatgtggatcccgggatccagggtgtggtaaccgacttggccgtctctgatgcaggggagaaggtggaatgtagaaattttccaggttcttcacaatcagagattatacaagccatacagaatttaacccgtctcttatacagccttcaggccgccttgaccattcaggacagccacattgagatccacaggctggttctccagcagcaggagggcctgtctctcggccactctatcctccgaggcggccccttgcaggaccagaagtctcgcgacgcggacaggcagcatgaggagctggccaatgtgcaccagcttcagcaccagctccagcaggagcagcggcgctggctgcgcaggtgtgagcagcagcagcgggcgcaggcgaccagggagagctggctgcaggagcgggagcgggagtgccagtcgcaggaggagctgctgctgcggagccggggcgagctggacctccagctccaggagtaccagcacagcctggagcggctgagggagggccagcgcctggtggagagggagcaggcgaggatgcgggcccagcagagcctgctgggccactggaagcacggccggcagaggagcctgcccgcggtgctccttccgggtggccccgaggtaatggaacttaatcgatctgagagtttatgtcatgaaaactcattcttcatcaatgaagctttagtacaaatgtcatttaacactttcaacaaactgaatccgtcagttatccatcaggatgccacttaccctacaactcaatctcattctgacttggtgaggactagtgaacatcaagtagacctcaaggtggacccttctcagccttcgaatgtcagtcacaaactgtggacagccgctggttccggccatcagatacttcctttccaagaaagcagcaaggattcttgtaaaaatgatttggacacctcccacactgagtccccaaccccccatgactcaaattcacaccgccctcaactgcaggcgtttataacagaagcaaagctaaatctaccgacaaggacaatgaccagacaagatggggaaactggagatggagccaaagaaaatattgtttacctctaattgtgttgtcatttttccaaacaaaacaaaacactggcacttttgggagaaactttttgtctccattccttatgtatgtgtgattgtctgtgtccaaattgctttaagaataatatttaatatttcctggaagctcatttttttggcatgagtctaattaaattattgaaagccaaaaaaaaa

SEQ ID NO: 32 - DNA, 1228 bp, Homo sapiens
  CDS (106)..(969)
ggaaagcgggagggacaaattgccaatgtttggagtctggtttccaggttgccgtttttgggggctctgggtgtggcggttgccgtagctgaaattggctgcaccatgtcggccttcgagaagcctcagatcatcgcccatatccagaagggcttcaactacacggtgtttgactgtaagtgggtgccctgcagcgccaaatttgtgaccatgggcaacttcgcacggggcaccggcgtcattcagctgtacgagatccagcacggggacctgaagctgcttcgggagattgaaaaggccaaacctattaaatgtggaacatttggtgcaacatctttacagcagagatatttagctactggagattttggtggaaaccttcatatatggaatttagaagctccagagatgccagtatattctgtaaagggccataaagaaattataaatgccatagatggcataggtggactaggaattggagaaggagcacctgaaattgtgactggcagccgagatggaactgtgaaggtgtgggacccaaggcaaaaagatgatcctgttgctaatatggaacctgtacaaggagaaaacaagagagactgttggactgtggcatttggcaatgcttataatcaagaagaacgtgttgtttgtgctggctatgacaatggggatatcaaactatttgatctcagaaatatggcattacggtgggagacaaacatcaaaaatggggtgtgtagcttggagtttgacagaaaagacataagtatgaataagttagtagccacatctctggaaggaaagttccatgtttttgacatgagaacacagcatccaaccaaaggttttgcctctgtttcagaaaaggctcataaatctactgtgtggcaggtccgacacctgccgcagaacagggagctctttctgacagctggaggcgccggcggccttcacctctggaagtagtctaacatctccaccctgtgacgccttcccatagaaatggtacacaaaaggtccttaggcttgggtccgtgtaatggagctcgagggttagaagctggcatcagtttttcattctggaagtgtttagatgaagttctgcaaatgttacttacagccattgcctttgcacattgtttgcctgtgatatccagcaatctatatctggagaaaaattacaataaataaaagattgccaaaagcaccaaaaaaaaaaaaa

SEQ ID NO: 33 - DNA, 2684 bp, Homo sapiens
  CDS (78)..(1574)
ggcctttgagccccgcccccgccgtgtgagtgtcttgggaggagccccaggacacaaccccgaccgcaggacgagagatggtatcgatacacagcctctctgagctggagcgtctgaagctgcaagagactgcttaccacgaactcgtggccagacatttcctctccgaattcaaacctgacagagctctgcctattgaccgtccgaacaccttggataagtggtttctgattttgagaggacagcagagggctgtatcacacaagacatttggcattagcctggaagaggtcctggtgaacgagtttacccgccgcaagcatcttgaactgacagccacgatgcaggttgaagaagccaccggtcaggctgcgggccgtcgtcggggaaacgtggtgcgaagggtgtttggccgcatccggcgctttttcagtcgcaggcggaatgagcccaccttgccccgggagttcactcgccgtgggcgtcgaggtgcagtgtctgtggatagtctggctgagctggaagacggagccctgctgctgcagaccctgcagctttcaaaaatttcctttccaattggccaacgacttctgggatccaaaaggaagatgagtctcaatccgattgcgaaacaaatcccccaggttgttgaggcttgctgccaattcattgaaaaacatggcttaagcgcagtggggatttttacccttgaatactccgtgcagcgagtgcgtcagctccgtgaagaatttgatcaaggtctggatgtagtgctggatgacaatcagaatgtgcatgatgtggctgcactcctcaaggagtttttccgtgacatgaaggattctctgctgccagatgatctgtacatgtcattcctcctgacagcaactttaaagccccaggatcagctttctgccctgcagttgctggtctacctgatgccaccctgccacagtgataccctggagcgtctgctgaaggccctgcataaaatcactgagaactgcgaggactcaattggcattgatggacagttggtcccaggcaaccgtatgacttccactaacttggccttggtgtttggatctgctctcctgaaaaaaggaaagtttggcaagagagagtccaggaaaacaaagctggggattgatcactatgttgcttctgtcaatgtggtccgtgccatgattgataactgggatgtcctcttccaggtgcctccccatattcagaggcaggttgctaagcgcgtgtggaagtccagcccggaagcacttgattttatcagacgcaggaacttgaggaagatccagagtgcacgcataaagatggaagaggatgcactactttctgatccagtggaaacctctgctgaagcccgggctgctgtccttgctcaaagcaagccttctgatgaaggttcctctgaggagccagctgtgccttccggcactgcccgttcccatgacgatgaggaaggagcgggtaaccctcccattccggagcaagaccgcccattgctccgtgtgccccgggagaaggaggccaaaactggcgtcagctacttctttccttagatgtttttccttctataaggtgccagacaggggaaaagggtgggggtacatctgggatgtcacaggaaacattaaggagagagttgaaggtaaagatctgaaggtaagaaggagttccacctgatgctcgggtcaggatgagaattccaaacacactgccagccccttcactggggatgcttggtctcttctgctggtaaaagcagagatgtttctgtgtcatgcccaagctccccggtgctaccttgcctttctcttttacccctgatcttggctttctctctctctctgcagactttcctttaattgatgtgacatttgtggtaaacacctttcccagggaacctcacaaatcttgagatgctttcccttccccaaatgggattgcatgatttccctgactttcctaccctcctccagagagctcagttggaaaggccctcaagaggcatgctagaacgttaggtcagcctactgacagctgacaaacaattaatgcgaaatcatgtcacaccaacccatagccgtgtccacgcagcaactccaccaccttaggatttccccctccaaattattcagaccaatggcttgccaaatggcctctcccaaaattctgtacagttttgctcaggtcacgccaacagggaaacctcaagtgtaggtctaattagtgtttctgggatccaaagttagaggaaaatttagattttattgcctggatctgctttaaagacaattggtgtttacaccctcttgtcagcaaaacagctagttaggtaaggacatatagttccaagtaggtaaagtcacttgattacaaatgttcttaactatcgtctctgtaattcctttatacaggacagtacaaaattgtgggacatgctctggtaacacacagatatgggttgcatatgatccagaattacagctgatattatggatgacaactgctaaggtccataaaatgaagactgtattgtattgagggatagaaattgatcatttaatgggtaacaactgctgagctcaaagatttgtgattgttaaaacttctctggcatttaatcattaataaacatctgtattgtgacagcagcaaaaaaaaaa

SEQ ID NO: 34 - DNA, 3213 bp, Homo sapiens
  CDS (365)..(973)
agcgctccgcaatatccgggtcgacgatctcgtaccccctcggcggcccgcatctgcccccgcgcgcccgccctgagcccgccccgactgggcaggcgggggagcccctacttctctccccccgggcgggggagccggggggcagcgccggagcccggggggagctcagccccgccgaccggccggccagggcagggggcagctaggacggccccggtccaggtggaggccgcagagggcccagggcaagcagaggcagcaatggttggtcctgacggtggctgagcccccagcccctggaatatgcagcccgggggagtcccagacagcggcaaggacgaggtggcggagtggggcgggaggcatggtctccacctaccgggtggccgtgctgggggcgcgaggtgtgggcaagagtgccatcgtgcgccagttcttgtacaacgagttcagcgaggtctgcgtccccaccaccgcccgccgcctttacctgcctgctgtcgtcatgaacggccacgtgcacgacctccagatcctcgactttccacccatcagcgccttccctgtcaatacgctccaggagtgggcagacacctgctgcaggggactccggagtgtccacgcctacatcctggtctacgacatctgctgctttgacagctttgagtacgtcaagaccatccgccagcagatcctggagacgagggtgatcggaacctcagagacgcccatcatcatcgtgggcaacaagcgggacctgcagcgcggacgcgtgatcccgcgctggaacgtgtcgcacctggtacgcaagacctggaagtgcggctacgtggaatgctcggccaagtacaactggcacatcctgctgctcttcagcgagctgctcaagagcgtcggctgcgcccgttgcaagcacgtgcacgctgccctgcgcttccagggcgcgctgcgccgcaaccgctgcgccatcatgtgacgcctgcgcgcccctcgggctgcaccggcactggccgacgcggagggctggtgccgttactgcgcggacttggcgcgggcagcgcggcgggaaatgacctgtgacgtgtccccgggctgagggcccctgcagccacgcagcctcccggtgagaagcagagcgcgagagggagccctccgtaactgcccagccctgccccttgcccccgtggcttcctgggacaggccgccttcagtgctgtatttagtgcagtgcccggcccgacccgcgggggtgccacagccttttgggatgggggtgagcgtgcaatggaggctgggcggtggcgaggtgccgccttggccgggcccccacgtgtcttctccagaatgtgtctgtctttgcctggtgtcttcctttcccgtgtccgcccaccccagcgtctgttggtacttacctgtctcacctaccctccagtcccctcccagctccgctcacagggctctcatttcgtccatccccttgtcgcagatcctggcagcttctttgtgaggccaggccttctgactgtcagcaccaccggcacagggcagagatgcgggtggcccaaggaccacgatcaaggggtccgggggaccgaggtcccagatcagtgaggggagaaggttgagctctccggcttccagggagacctccccgcccagcagcccccagagacacaacaacctaccttccagccttaactcgatggtccgtccctgccaggtgcccctcactcttcctgaccccaaagccagatcaccccctgggttaaaactttttttcttttttttttgggacagagtgtggaaagggagcccccaaaggatagcttctttttcatgatgccaggctccagtcctttattcccttctgcatactgcaatctgatctgtcagactggggaatgttgggttctggggtctggtcgtgggcaggatggtgcccagaagggggttaggttgtcccagtgaaaattctgttgccccgtctcaaccccatctgactaccccagactctgcctgcctcagatctcagactatcctgattaatctggggaagaacagagccagggaaagaatggtggggacccctgtacttgggggagacacacctgcatcttcctcctgccacagatggaggccctcaggatctgacaccctcttgtcccaacaccagtcagccctataccctaactcactccaccccattttctccggctgcctggccgggtttctacctctcgtcaccggagctgatcactgtcagttttgtaccgatttagaaataacaataataatgaagattctaggaatggcatgagggattgatgggggacttggagggagggacaagtggtgccctgtcccctgctcccctggccaaagaaagctgtccttgaggctgagccctcagccctggcctggtggggggacagcaaggtcccttgttataagaggggcagagaggacaactccgctttggccaacctagccaaggctgcagcatatagaccaggaaatcaggtagcccagactggtgatggagcagagtctgggggaagggtcgtgggtggggaatttatcaccaacatccattgtagggggaatctatgattctgcttccccagcggattcccactctgtccaccaagtggggggtagcacagcctcacagcaaccgccctgaccttgggcagtctagtgttcctgcattctagtccctgctgtgctgcaggactttgggcaagtgacctgccctctgtgagcctccctctgacacagaggaggtggctccccttccccacaccttagagtggctgggagggtaacaaagagggcctgcccctttagtctcctgcacccctgccccctggttcaccagagggagcggatgaaggatggcagcatctcacatgccccatcaccaactctgaggcacctggggtgggggggcggagcccaggcctctggctgctcccctgtgggagccattggaatgtatcccctgacaggcccccttccgcctccacctcaacccaggtcttggatttcaggtccctccacccccattctgagtctctgtccttctccttccacccgctcccagggtttcccaccacagggtctggaagtgtgtgtgacgcccattgagctgttacccgaagtcagattaaaaatcagggagtgttttccctcgtttctgtaaaaaaaaaaaaa

SEQ ID NO: 35 - DNA, 1005 bp, Homo sapiens
  CDS (211)..(825)
gcggggctgggggctcggcccgccttgccctgaggcgctgggtgccttccagttggctgcgaccagcggtgacttacaagttggctgctgtcgcctgcgcatcggcgggccgggaggctgagcagtactgttgagagcggtgtgaggtgcttggtagcgcgccgtagctgcttccacgtccttgcttcacctcaggtaaagagagaagtaatggaaggcctgtctgatgttgcttcttttgcaactaaacttaaaaacactctcatccagtaccatagcattgaagaagataagtggcgagttgctaagaaaacgaaagatgtaactgtttggagaaaaccctcagaagaatttaatggatatctctacaaagcccaaggtgttatagatgaccttgtctatagtataatagaccatatacgcccagggccttgtcgtttggattgggacagcttgatgacttctttggatattctggagaactttgaagagaattgctgtgtgatgcgttacactactgctggtcagctttggaatataatttccccaagagaatttgttgatttctcctatactgtgggctataaagaagggcttttatcttgtggaataagtcttgactgggatgaaaagagaccagaatttgttcgaggatataaccatccctgtggttggttttgtgttccacttaaagacaacccaaaccagagtcttttgacaggatatattcagacagatctgcgtgggatgattcctcagtctgcggtagatacagccatggcaagcactttaaccaacttctatggtgatttacgaaaagctttatgagaggcaaaatacattcaaacttgtagtactacagatcaactctctcagctacatggcctgtaaaaatcattgattccacttttctgcatagccggtagaaaaatttgaaatgtttttggttcactagtacaatgtttggttttattcctaaagtaaatagctatctaagagagggca

SEQ ID NO: 36 - DNA, 3026 bp, Homo sapiens
  CDS (181)..(2880)
ttagtgaagtagaagtatttgagtatcttgatgcagtaacttatagttgtgatcctgcacctggaccagatccattttcacttattggagagagcacgatttattgtggtgacaattcagtgtggagtcgtgctgctccagagtgtaaagtggtcaaatgtcgatttccagtagtcgaaaatggaaaacagatatcaggatttggaaaaaaattttactacaaagcaacagttatgtttgaatgcgataagggtttttacctcgatggcagcgacacaattgtctgtgacagtaacagtacttgggatcccccagttccaaagtgtcttaaaggcagttccggcgaggggggagcctcagcaggattgctgtgtgaaaaccgagctgctgggagaagagacacctatggctgccgatgaaggctcagcagagaaacaggcaggagaggcccacatggctgcggacggtgagaccaatgggtcttgtgaaaacagcgatgccagcagtcatgcaaatgctgcaaagcacactcaggacagcgcaagggtcaacccccaggatggcaccaacacactaactcggatagcggaaaatggggtttcagaaagagactcagaagcggcgaagcaaaaccacgtcactgccgacgactttgtgcagacttctgtcatcggcagcaacggatacatcttaaataagccggccctacaggcacagcccttgaggactaccagcactctggcctcttcgctgcctggccatgctgcaaaaacccttcctggaggggctggcaaaggcaggactccaagcgcttttccccagacgccagccgccccaccagccacccttggggaggggagtgctgacacagaggacaggaagctcccggcccctggcgccgacgtcaaggtccacagggcacgcaagaccatgccgaagtccgtcgtgggcctgcatgcagccagtaaagatcccagagaagttcgagaagctagagatcataaggaaccaaaagaggagatcaacaaaaacatttctgactttggacgacagcagcttttaccccccttcccatcccttcatcagtcgctacctcagaaccagtgctacatggccaccacaaaatcacagacagcttgcttgccttttgttttagcagctgcagtatctcggaagaaaaaacgaagaatgggaacctatagcctggttcctaagaaaaagaccaaagtattaaaacagaggacggtgattgagatgtttaagagcataactcattccactgtgggttccaagggggagaaggacctgggcgccagcagcctgcacgtgaatggggagagcctggagatggactcggatgaggacgactcagaggagctcgaggaggacgacggccatggcgcagagcaggcggccgcgttccccacagaggacagcaggacttccaaggagagcatgtcggaggctgatcgcgcccagaagatggacggggagtccgaggaggagcaggagtccgtggacaccggggaggaggaggaaggcggtgacgagtctgacctgagttcggaatccagcattaagaagaaatttctcaagaggaaaggaaagaccgacagtccctggatcaagccagccaggaaaaggaggcggagaagtagaaagaagcccagcggtgccctcggttctgagtcgtataagtcatctgcaggaagcgctgagcagacggcaccaggagacagcacagggtacatggaagtttctctggactccctggatctccgagtcaaaggaattctgtcttcacaagcagaagggttggccaacggtccagatgtgctggagacagacggcctccaggaagtgcctctctgcagctgccggatggaaacaccgaagagtcgagagatcaccacactggccaacaaccagtgcatggctacagagagcgtggaccatgaattgggccggtgcacaaacagcgtggtcaagtatgagctgatgcgcccctccaacaaggccccgctcctcgtgctgtgtgaagaccaccggggccgcatggtgaagcaccagtgctgtcctggctgtggctacttctgcacagcgggtaattttatggagtgtcagcccgagagcagcatctctcaccgtttccacaaagactgtgcctctcgagtcaataacgccagctattgtccccactgtggggaggagagctccaaggccaaagaggtgacgatagctaaagcagacaccacctcgaccgtgacaccagtccccgggcaggagaagggctcggccctggagggcagggccgacaccacaacgggcagtgctgccgggccaccactctcggaggacgacaagctgcagggtgcagcctcccacgtgcccgagggctttgatccaacgggacctgctgggcttgggaggccaactcccggcctttcccagggaccagggaaggaaaccttggagagcgctctcatcgccctcgactcggaaaaacccaagaagcttcgcttccacccaaagcagctgtacttctccgccaggcaaggggagcttcagaaggtgctcctcatgctggtggacggaattgaccccaacttcaaaatggagcaccagaataagcgctctccactgcacgccgcggcagaggctggacacgtggacatctgccacatgctggttcaggcgggcgctaatattgacacctgctcagaagaccagaggaccccgttgatggaagcagccgaaaacaaccatctggaagcagtgaagtacctcatcaaggctggggccctggtggatcccaagatacagaaaacttctaaagtttatacggagtctcaagagacccagagaagccaaacaattttgtgaaagaacagagttggagaactcacacttgctgatttcaaaacttactatatacggccacagtaatgaaaacagtgtgggactggcataaagacagaaatagagaccaatggaataaaataaaaagcccagaaataaaaaaaaaa

SEQ ID NO: 37 - DNA, 2882 bp, Homo sapiens
  CDS (181)..(2736)
ttagtgaagtagaagtatttgagtatcttgatgcagtaacttatagttgtgatcctgcacctggaccagatccattttcacttattggagagagcacgatttattgtggtgacaattcagtgtggagtcgtgctgctccagagtgtaaagtggtcaaatgtcgatttccagtagtcgaaaatggaaaacagatatcaggatttggaaaaaaattttactacaaagcaacagttatgtttgaatgcgataagggtttttacctcgatggcagcgacacaattgtctgtgacagtaacagtacttgggatcccccagttccaaagtgtcttaaaggcagttccggcgaggggggagcctcagcaggattgctgtgtgaaaaccgagctgctgggagaagagacacctatggctgccgatgaaggctcagcagagaaacaggcaggagaggcccacatggctgcggacggtgagaccaatgggtcttgtgaaaacagcgatgccagcagtcatgcaaatgctgcaaagcacactcaggacagcgcaagggtcaacccccaggatggcaccaacacactaactcggatagcggaaaatggggtttcagaaagagactcagaagcggcgaagcaaaaccacgtcactgccgacgactttgtgcagacttctgtcatcggcagcaacggatacatcttaaataagccggccctacaggcacagcccttgaggactaccagcactctggcctcttcgctgcctggccatgctgcaaaaacccttcctggaggggctggcaaaggcaggactccaagcgcttttccccagacgccagccgccccaccagccacccttggggaggggagtgctgacacagaggacaggaagctcccggcccctggcgccgacgtcaaggtccacagggcacgcaagaccatgccgaagtccgtcgtgggcctgcatgcagccagtaaagatcccagagaagttcgagaagctagagatcataaggaaccaaaagaggagatcaacaaaaacatttctgactttggacgacagcagcttttaccccccttcccatcccttcatcagtcgctacctcagaaccagtgctacatggccaccacaaaatcacagacagcttgcttgccttttgttttagcagctgcagtatctcggaagaaaaaacgaagaatgggaacctatagcctggttcctaagaaaaagaccaaagtattaaaacagaggacggtgattgagatgtttaagagcataactcattccactgtgggttccaagggggagaaggacctgggcgccagcagcctgcacgtgaatggggagagcctggagatggactcggatgaggacgactcagaggagctcgaggaggacgacggccatggcgcagagcaggcggccgcgttccccacagaggacagcaggacttccaaggagagcatgtcggaggctgatcgcgcccagaagatggacggggagtccgaggaggagcaggagtccgtggacaccggggaggaggaggaaggcggtgacgagtctgacctgagttcggaatccagcattaagaagaaatttctcaagaggaaaggaaagaccgacagtccctggatcaagccagccaggaaaaggaggcggagaagtagaaagaagcccagcggtgccctcggttctgagtcgtataagtcatctgcaggaagcgctgagcagacggcaccaggagacagcacagggtacatggaagtttctctggactccctggatctccgagtcaaaggaattctgtcttcacaagcagaagggttggccaacggtccagatgtgctggagacagacggcctccaggaagtgcctctctgcagctgccggatggaaacaccgaagagtcgagagatcaccacactggccaacaaccagtgcatggctacagagagcgtggaccatgaaggtaattttatggagtgtcagcccgagagcagcatctctcaccgtttccacaaagactgtgcctctcgagtcaataacgccagctattgtccccactgtggggaggagagctccaaggccaaagaggtgacgatagctaaagcagacaccacctcgaccgtgacaccagtccccgggcaggagaagggctcggccctggagggcagggccgacaccacaacgggcagtgctgccgggccaccactctcggaggacgacaagctgcagggtgcagcctcccacgtgcccgagggctttgatccaacgggacctgctgggcttgggaggccaactcccggcctttcccagggaccagggaaggaaaccttggagagcgctctcatcgccctcgactcggaaaaacccaagaagcttcgcttccacccaaagcagctgtacttctccgccaggcaaggggagcttcagaaggtgctcctcatgctggtggacggaattgaccccaacttcaaaatggagcaccagaataagcgctctccactgcacgccgcggcagaggctggacacgtggacatctgccacatgctggttcaggcgggcgctaatattgacacctgctcagaagaccagaggaccccgttgatggaagcagccgaaaacaaccatctggaagcagtgaagtacctcatcaaggctggggccctggtggatcccaagatacagaaaacttctaaagtttatacggagtctcaagagacccagagaagccaaacaattttgtgaaagaacagagttggagaactcacacttgctgatttcaaaacttactatatacggccacagtaatgaaaacagtgtgggactggcataaagacagaaatagagaccaatggaataaaataaaaagcccagaaataaaaaaaaaa

SEQ ID NO: 38 - DNA, 2951 bp, Homo sapiens
  CDS (181)..(2805)
ttagtgaagtagaagtatttgagtatcttgatgcagtaacttatagttgtgatcctgcacctggaccagatccattttcacttattggagagagcacgatttattgtggtgacaattcagtgtggagtcgtgctgctccagagtgtaaagtggtcaaatgtcgatttccagtagtcgaaaatggaaaacagatatcaggatttggaaaaaaattttactacaaagcaacagttatgtttgaatgcgataagggtttttacctcgatggcagcgacacaattgtctgtgacagtaacagtacttgggatcccccagttccaaagtgtcttaaaggcagttccggcgaggggggagcctcagcaggattgctgtgtgaaaaccgagctgctgggagaagagacacctatggctgccgatgaaggctcagcagagaaacaggcaggagaggcccacatggctgcggacggtgagaccaatgggtcttgtgaaaacagcgatgccagcagtcatgcaaatgctgcaaagcacactcaggacagcgcaagggtcaacccccaggatggcaccaacacactaactcggatagcggaaaatggggtttcagaaagagactcagaagcggcgaagcaaaaccacgtcactgccgacgactttgtgcagacttctgtcatcggcagcaacggatacatcttaaataagccggccctacaggcacagcccttgaggactaccagcactctggcctcttcgctgcctggccatgctgcaaaaacccttcctggaggggctggcaaaggcaggactccaagcgcttttccccagacgccagccgccccaccagccacccttggggaggggagtgctgacacagaggacaggaagctcccggcccctggcgccgacgtcaaggtccacagggcacgcaagaccatgccgaagtccgtcgtgggcctgcatgcagccagtaaagatcccagagaagttcgagaagctagagatcataaggaaccaaaagaggagatcaacaaaaacatttctgactttggacgacagcagcttttaccccccttcccatcccttcatcagtcgctacctcagaaccagtgctacatggccaccacaaaatcacagacagcttgcttgccttttgttttagcagctgcagtatctcggaagaaaaaacgaagaatgggaacctatagcctggttcctaagaaaaagaccaaagtattaaaacagaggacggtgattgagatgtttaagagcataactcattccactgtgggttccaagggggagaaggacctgggcgccagcagcctgcacgtgaatggggagagcctggagatggactcggatgaggacgactcagaggagctcgaggaggacgacggccatggcgcagagcaggcggccgcgttccccacagaggacagcaggacttccaaggagagcatgtcggaggctgatcgcgcccagaagatggacggggagtccgaggaggagcaggagtccgtggacaccggggaggaggaggaaggcggtgacgagtctgacctgagttcggaatccagcattaagaagaaatttctcaagaggaaaggaaagaccgacagtccctggatcaagccagccaggaaaaggaggcggagaagtagaaagaagcccagcggtgccctcggttctgagtcgtataagtcatctgcaggaagcgctgagcagacggcaccaggagacagcacagggtacatggaagtttctctggactccctggatctccaggaagtgcctctctgcagctgccggatggaaacaccgaagagtcgagagatcaccacactggccaacaaccagtgcatggctacagagagcgtggaccatgaattgggccggtgcacaaacagcgtggtcaagtatgagctgatgcgcccctccaacaaggccccgctcctcgtgctgtgtgaagaccaccggggccgcatggtgaagcaccagtgctgtcctggctgtggctacttctgcacagcgggtaattttatggagtgtcagcccgagagcagcatctctcaccgtttccacaaagactgtgcctctcgagtcaataacgccagctattgtccccactgtggggaggagagctccaaggccaaagaggtgacgatagctaaagcagacaccacctcgaccgtgacaccagtccccgggcaggagaagggctcggccctggagggcagggccgacaccacaacgggcagtgctgccgggccaccactctcggaggacgacaagctgcagggtgcagcctcccacgtgcccgagggctttgatccaacgggacctgctgggcttgggaggccaactcccggcctttcccagggaccagggaaggaaaccttggagagcgctctcatcgccctcgactcggaaaaacccaagaagcttcgcttccacccaaagcagctgtacttctccgccaggcaaggggagcttcagaaggtgctcctcatgctggtggacggaattgaccccaacttcaaaatggagcaccagaataagcgctctccactgcacgccgcggcagaggctggacacgtggacatctgccacatgctggttcaggcgggcgctaatattgacacctgctcagaagaccagaggaccccgttgatggaagcagccgaaaacaaccatctggaagcagtgaagtacctcatcaaggctggggccctggtggatcccaagatacagaaaacttctaaagtttatacggagtctcaagagacccagagaagccaaacaattttgtgaaagaacagagttggagaactcacacttgctgatttcaaaacttactatatacggccacagtaatgaaaacagtgtgggactggcataaagacagaaatagagaccaatggaataaaataaaaagcccagaaataaaaaaaaaa

SEQ ID NO: 39 - DNA, 2471 bp, Homo sapiens
  CDS (61)..(1251)
aaattccacaaagagattatccatgagctggagaagaagatagaacttgacgtgaaatatatgaacgcaactctaaaaagataccaaacagaacacaagaataaattagagtctttggagaaatcccaagctgagttgaagaagatcagaaggaaaagccaaggaagccgaaacgcactcaaatatgaacacaaagaaattgagtatgtggagaccgttacttctcgtcagagtgaaatccagaaattcattgcagatggttgcaaagaggctctgcttgaagagaagaggcgcttctgctttctggttgataagcactgtggctttgcaaaccacatacattattatcacttacagtctgcagaactactgaattccaagctgcctcggtggcaggagacctgtgttgatgccatcaaagtgccagagaaaatcatgaatatgatcgaagaaataaagaccccagcctctacccccgtgtctggaactcctcaggcttcacccatgatcgagagaagcaatgtggttaggaaagattacgacaccctttctaaatgctcaccaaagatgccccccgctccttcaggcagagcatataccagtcccttgatcgatatgtttaataacccagccacggctgccccgaattcacaaagggtaaataattcaacaggtacttccgaagatcccagtttacagcgatcagtttcggttgcaacgggactgaacatgatgaagaagcagaaagtgaagaccatcttcccgcacactgcgggctccaacaagaccttactcagctttgcacagggagatgtcatcacgctgctcatccccgaggagaaggatggctggctctatggagaacacgacgtgtccaaggcgaggggttggttcccgtcgtcgtacacgaagttgctggaagaaaatgagacagaagcagtgaccgtgcccacgccaagccccacaccagtgagaagcatcagcaccgtgaacttgtctgagaatagcagtgttgtcatccccccacccgactacttggaatgcttatccatgggggcagctgccgacaggagagcagattcggtcaggacgacatccacctttaaggccccagtgttcaagcccgagaccgcggctcctaacgatgccaacgggactgcaaagccgccttttctcagcggagaaaacccctttgccactgtgaaactccgcccgactgtgacgaatgatcgctcggcacccatcattcgatgagaggacagccaaggactctcccgggcctctccggttctcccttgcggaatgatgggcgcatcctgtctgccacgtgctgacggtcgggaagcttcagtggagaggcctaactctaatgtcgcctgcttaagcaaatcatgccttctctgtttcacgtagttgggttgacaagtttctgcctttaagataaatgagtaatagtctaatgaccagctcagccatttaaaatattttcttcctattctgttcaagaaacagtaaacttggtttcaatctttactgtattttttaaatgaattttttccttaataacagccagaataagggatagtctatgctttcaggactggctttctgcacctgatatgaatgagaccagttttattttataaagcatgtgctcttaatagcattatgtctaaagaagatatcacgtaagtttgcatcttagcatgcaaatcataattttaagcaatataaattatgaaaatactatataaatgtaatttaacttaaaatgtttaagtgtagagcttccagagatggagaaacccccaccctccctccaaccacgccagagctgtagagtgctaagacgctttgcctgcccttatcacagccacacgtagcactcgacgaaatctcctccgagagctccttttcttggtagttaggagtcgccaacggattcgctgcacacggcccatccaggacacaggcctgggcgtcggagtcacggctccttgtgttctcactcagctagttggccaaagctgcatccattaccagtacactcaaactgctcggggtcctggtttctccgtgtttgaatcaggtacagactctcaaaggatacgtgtaaagccaggatgacctctggtgcctggagaagggcgggtttttcagcctagcagccatgatgccctcggaacctggccctatggtatggatgtgaggactacgcactggctgccctgagcccggggctggaaatcatctctggctgccaaggatctggactggttcctggccgggacagcgctgtcagaaagatggtgaagcccaaagctaccaggtgcgccaagatcccactgcctctccgcagccagcgggtcagtctcggctccccagctggagcgggaaccagacctacctccaggggctgcatggccgtggcccgcgggcccgtacactccagctgcccgtactcgacgaaa

SEQ ID NO: 40 - DNA, 1673 bp, Homo sapiens
  CDS (81)..(1670)
cggagcttccacaaaccagatagaggttctccagcttttctttgattgtctctgctttagcgtctctaaatccggtcaccatgtcggaccccgaaggcgagaccttgcgaagcacctttccctcttatatggccgaaggcgagcggctctacctgtgcggggaattttctaaagccgcgcagagcttcagcaacgctctttaccttcaggatggagacaagaactgcctggttgctcgctcaaagtgcttcctgaagatgggagacttggagagatccctgaaggatgctgaggcttcgctccagagtgacccagctttctgtaaggggattttgcaaaaggctgagacactgtacaccatgggagactttgagtttgccttggtattctatcatcgaggctacaagctgaggcctgatcgggaattcagagttggcattcagaaagcccaggaagccatcaacaactcagtgggaagtccttcttccattaagctggagaacaaaggggacctctccttcttaagcaagcaggctgagaatataaaagcccagcagaagcctcagcccatgaaacacctcttacaccccaccaagggagagcccaagtggaaggcctcgctcaagagtgagaagactgtccgccagcttctgggggagctctacgtggacaaagagtatttggagaagctcctattggatgaagacctgatcaaaggcaccatgaagggcggcctgactgtggaggacctcatcatgacgggcatcaactacctggatactcacagcaacttctggaggcagcagaagccgatctacgccagggagcgggaccggaagctgatgcaagagaaatggctgcgggaccacaaacgccgtccctcacagacagcccattacatcctcaagagcctggaggacattgatatgttgctcacaagtggcagtgctgaagggagtcttcagaaagctgagaaagtgctgaagaaggtactggaatggaacaaggaagaggtacccaacaaggatgaactggttggaaacttgtatagctgcatagggaatgcccagattgagctggggcagatggaggcagccctgcagagccacagaaaggacctggagatcgccaaggaatatgaccttcctgatgcaaaatcgagagcccttgacaacattggcagagtttttgccagagttgggaaattccagcaagccattgacacgtgggaagaaaagatccctctggcaaaaaccaccctggagaagacctggctgttccacgagatcggccgctgctacttggagctggaccaggcctggcaggcccagaattatggcgagaagtcccagcagtgtgccgaggaggaaggggacattgagtggcaactgaatgccagtgttctggtggcccaggcacaagtgaagctgagagacttcgagtcagccgtgaacaattttgagaaggccctggagagagcaaagcttgtgcataacaacgaggcgcagcaggccatcatcagtgccttggacgatgccaacaagggtatcatcagagaactgaggaaaaccaactacgtggagaatctcaaagaaaaaagcgagggagtccgagacacatgcgacagcagctccccaatctgggggcttggcactgcccatcgtgcattctaa

SEQ ID NO: 41 - DNA, 2339 bp, Homo sapiens
  CDS (231)..(1550)
gatgcccagcatgagtgtataccgtgagggcctttgttccttctgacagcgtggagtggtcaaggaaggcctccaggaggaagaggtggccaaccgccccaggcagcacagtgctgtctctggacggagggacgggaagtggccagaaggggaagtgtgaggagttcccgtccagcctgtcatcagtctccccaggtcttgaagcggcggccctgctcctggccgtgaccatggaccctctggagacccctatcaaggatggcatcctctaccagcagcatgtcaagtttggcaagaagtgctggcggaaggtgtgggctctgctgtatgcaggaggcccatcaggcgtggcacggctggagagctgggaggtccgggatggtggcctgggagcagcgggtgacaggtcggcagggcctggccggcgaggggagcgacgggtcatccgcctggctgactgtgtgtccgtgctgccggctgacggcgagagctgcccccgggacaccggtgccttcctgctcaccaccaccgagcgaagccatctactggctgctcagcaccgccaggcctggatgggccccatctgccagctggccttcccggggacaggggaggcctcctcaggatccacagatgcccagtctcccaagaggggcctggtccccatggaggaaaactccatctactcctcctggcaggaagtgggcgagtttcccgtggtggtgcagaggactgaggccgccacccgctgccagctgaaggggccggccctgctggtgctgggcccagacgccatccagctgagggaggccaagggcacccaggccctctacagctggccctaccacttcctgcgcaagctcggctccgacaagggcgtgttctcctttgaggccggccgtcgctgccactcgggtgagggcctctttgccttcagcaccccctgtgcccctgacctgtgcagggctgtggccggggccatcgcccgccagcgggagcggctgccagagctgaccaggccccagccctgccccctgccacgggccacctctctgccctccctggacacccccggagagcttcgggagatgccaccaggacctgagccacccacgtccaggaaaatgcacctggccgagcccggaccccagagcctgccgctactgctaggcccggagcccaacgatctggcgtccgggctctacgcttcagtgtgcaagcgtgccagtgggcccccaggcaatgagcacctctatgagaacctgtgtgtgctggaggccagccccacgctgcacggtggggaacctgagccgcacgagggccccggcagccgcagccccacaaccagtcccatctaccacaacggccaggacttgagctggcccggcccggccaacgacagtaccctggaggcccagtaccggcggctgctggagctggatcaggtggagggcacaggccgccctgaccctcaggcaggtttcaaggccaagctggtgaccctgctgagtcgtgagcggaggaagggcccagccccttgtgaccggccctgaacgcccagcagagtggtggccagaggggagaggtgctccccctgggacaggagggtgggctggtgggcaaacattgggcccatgcagacacacgcctgtgtccaccctggcctgcaggaacaaggcaggccgcctgtggaggacctcagccctgccctgccctcctcatgaatagtgtgcagactcacagataataaagctcagagcagctcccggcaggggcactcacggcacacgcccctgcccacgttcattgcggccaacacaagcaccctgtgccggttccaggggcacaggtgacctgggccttacctgccacccgtgggctcaaacccactgcagcagacagacgggatggaaatcattaggactccatgttgctctgcacggccgagtgacacgaagaggcaggcggagggagctgtgaggcttacttgtcagactcaggaaggagcaacatgagggcccaactggagacccggaggcccgagctgggaggaggcagtgggggcggggtgcaggtggaagggatttcagagacaccctcgtccaaaacacttgttccctgctgaaactccaacaatttgcagatacttctgggaaccccaggcgtcagtctcctcatctgacgtcctgctccctgggaaagtgctggcccagtgtgtctggggagcctgaacctcagtttcttccctgatggagatgactttcagatatggcctgttgggggcactccgggctccagctccctggtcagcatccctggcatcagcttgcctcgtgccg

SEQ ID NO: 42 - DNA, 2382 bp, Homo sapiens
  CDS (385)..(1830)
gcgcggcggttgggccgttggctgttcggccctgggatccgccgccactccgcgatcagaccgctctgtgccgcgagccgccgtgagcactcggattcaagccggcgccaacgagtccgggggcatcgcccgcagcggccaagctcatggccggctgagcgggacgccgcctccgcctcagccaccgccgccgccgccgcctcctcctcctcagccggcggcgggcccgggcccagcaaccatggctgaagactactgggacgggcgcctgcggcgaacaggaggagaaggaggtcgcgcggcctcatcccgggccgccgccccaggcgccgccgcgccgggccccgcggctctgaggttgctcgcgcgcccccgccgatcgccatggatcggatgaagaagatcaaacggcagctgtcaatgacactccgaggtggccgaggcatagacaagaccaatggtgcccctgagcagataggcctggatgagagtggtggtggtggcggcagtgaccctggagaggcccccacacgtgctgctcctggggaacttcgttctgcacggggcccactcagctctgcaccagagattgtgcacgaggacttgaagatggggtctgatggggagagtgaccaggcttcagccacgtcctcggatgaggtgcagtctccagtgagagacatcaacaagcgcctatcactaccagctgacatccggctgcctgagggctacctggagaagctgaccctcaatagccccatctttgacaagcccctcagccgccgcctccgtcgtgtcagcctatctgagattggctttgggaaactggagacctacattaagctggacaaactgggcgagggtacctatgccaccgtctacaaaggcaaaagcaagctcacagacaaccttgtggcactcaaggagatcagactggaacatgaagagggggcaccctgcaccgccatccgggaagtgtccctgctcaaggacctcaaacacgccaacatcgttacgctacatgacattatccacacggagaagtccctcacccttgtctttgagtacctggacaaggacctgaagcagtacctggatgactgtgggaacatcatcaacatgcacaacgtgaaactgttcctgttccagctgctccgtggcctggcctactgccaccggcagaaggtgctacaccgagacctcaagccccagaacctgctcatcaacgagaggggagagctcaagctggctgactttggcctggcccgagccaagtcaatcccaacaaagacatactccaatgaggtggtgacactgtggtaccggccccctgacatcctgcttgggtccacggactactccactcagattgacatgtggggtgtgggctgcatcttctatgagatggccacaggccgtcccctctttccgggctccacggtggaggaacagctacacttcatcttccgtatcttaggaaccccaactgaggagacgtggccaggcatcctgtccaacgaggagttcaagacatacaactaccccaagtaccgagccgaggcccttttgagccacgcaccccgacttgatagcgacggggccgacctcctcaccaagctgttgcagtttgagggtcgaaatcggatctccgcagaggatgccatgaaacatccattcttcctcagtctgggggagcggatccacaaacttcctgacactacttccatatttgcactaaaggagattcagctacaaaaggaggccagccttcggtcttcgtcgatgcctgactcaggcaggccagctttccgcgtggtggacaccgagttctaagccacagaccgaggccccagcaggcagcggctggagggatgccacacccctcacagggcagcccccaactacatcttccctgcttactctctgcctacctgcctgagccatgttcacctgcccacttgtcccctgctgcctgcccaaacaccccaccattggcctgtcaacccacccattggcctgtctgctgggtgctaacaaagctctcatcactccttcacttggtctgtctgtctctgtcttggtaagttgccggtggacagcatggcgtgccagcctcccacactgaggccaggtctaccccccatcataccagccccaggacactaccccacggcagcaggggtccagagctagccagggtgggattcgcctcaccatgggacacgcctgaattaagagatctgggattagggacccagcgcaataggggcgaagggcacacggtacaaatacaaaaggtttagagccttagacgggcccgggcacattatagcgcacagagcagctactatcagatagaaaccaaatgtgcccgacgggagc

SEQ ID NO: 43 - DNA, 1896 bp, Homo sapiens
  CDS (31)..(1332)
gaagcgccgtgtagctgcgcttccgcaaagatggcggcggctgcgggtagctgcgcgcgggtggcggcctggggcggaaaactgcgacgggggctcgctgtcagccgacaggctgtgcggagtcccggccccttggcagcggcagtggccggcgcggccctggcaggagcaggagcggcctggcaccacagccgcgtcagtgttgcggcgcgggatggcagttttacagtctccgcacagaaaaatgttgaacatggaataatatatattgggaaaccgtctcttcgtaagcagcgcttcatgcagttttcttcactcgaacatgaaggagaatattatatgacaccacgagacttcctcttctcagtgatgtttgagcaaatggaacgtaaaacttcagtcaagaagctgacaaaaaaggacatcgaggatacactgtcagggatccaaacagctggctgtggatcaacttttttcagagaccttggcgataaagggctaatttcatataccgagtatcttttcttgcttacaatcctcactaaaccccattctggatttcatgttgcttttaaaatgctggatacagatggtaatgagatgattgaaaaaagggaattttttaagctgcagaagatcataagtaaacaagatgacttgatgacagtgaaaactaatgaaactggatatcaggaagcaatagtgaaagaacctgaaattaacacaactcttcagatgcgtttctttggaaaaagaggacaaagaaaacttcattataaagaatttcgaagatttatggaaaatttacaaacagagattcaagaaatggaattccttcagttttctaaaggtttgagtttcatgagaaaagaagactttgcagagtggctactttttttcactaacactgaaaataaagatatttattggaaaaatgtgagagagaagttgtcagcaggagagagcattagtttggatgaattcaagtcattttgccattttacaacccacttggaagactttgctattgccatgcagatgttcagtttagctcatcgtcctgtcagactagcggagtttaagagagctgtgaaagtagcaacaggacaagaactctcaaacaatattttggacactgtctttaagatctttgatttggatggtgatgaatgtcttagtcatgaagagtttcttggggtgttaaaaaacagaatgcatcgaggtttatgggtaccacaacatcagagtatacaagaatactggaagtgtgtgaagaaagaaagcattaaaggagtaaaagaagtctggaaacaagctggaaaaggtcttttttaataaaagatataatagtatggcaattatattgttccaaatgtcaaaatttgtgattttttagaagtacttgctatttatcttcttaagtcttcattgatattctgtgtgaaataagcatgtcttgtacttgctttctgattcataattttatgaaagaacttagtagaaagaaaagtaagtataaaaatagatattggattctgtcagaaggcctagatttgaaataatgttttgtacttcggtaagatggaaaacttagtgattcactgatttcttagacactctaatatgatatgctttctggaaggataaaacaaatacatatgggaaaaagtacttgagaccaaggccagcatcaattccagacatcttcatgttcctaataggctaaatgaagttaaaaacttatttcagatttttctcatctgtaccttatatctcataaatttattgcatattttatgtcagtagcttagctgtttattgtctttaaaataacatgtaaacttcaatgttctatctggaagcagaataaaatatttacatagatacaaaaaaaaa

SEQ ID NO: 44 - DNA, 1219 bp, Homo sapiens
  CDS (134)..(1093)
  misc_feature (1)...(1219): n = a,t,c or g
agcgggctgagagccgggcggtcgggcggcggcggcggcggcgggcggcgccccggtccgcggcgccgaggctcgcaccgggagctgcccatgggccgggcccggagttccggcgcgccgggagccggcagacatgccacagacgctgagtgcctccgacatggtcaccccaggcagcctcagcccaccccccaccgagcccacagatggcgaacaggctgggcagcccctcctggatggagcgccatcctcagcctccctggaaacactgatccagcacctggtgcccacagccgactactaccccgagaaagcctacatcttcaccttcctgctgagctctcgcctcttcatcgagccccgggagctcctggcccgggtctgccacctgtgcatcgagcagcagcagctggacaagccggtgctggacaaggcccgggtccggaagttcggccccaaactgctgcagctgttggccgagtggaccgagaccttcccaagggacttccaggaggagtcgactatcgggcaccttaaggacgtcgtgggccgcatcgccccctgtgacgaggcataccggaagaggatgcatcagctcctacaggctctgcaccagaagctggcggctctgcgccaggggccagaaggtctggtgggtgccgacaagcccatctcttacaggaccaagccaccagcctccatccacagggagctccttggtgtctgcagcgacccctacacactggcccagcagctgacccacgtggaactggacgcggctgcggacatcgggcctgaggagtttgtccaggcctttgtgaacaaggaccctctggccagcacaaagccctgcttcagtgacaagaccagcaacctggaggcttatgtgaaatggttcaacaggctgtgctacctggtggcaactgagatctgcatgccagccaagaagaagcagagggcccaggtgattgagttcttcatcgacgtggcccgcgagtgcttcaacatcggcaacttcaactccctcatggccatcatctccggcatgaacatgagccctgtctcccaggctgaagaagacctggggccaaagtgaggacggcccagttttttcatccttcgggcaccagtatganccaacgggaatttttttgcaattacaggacaggtttcgcggggcggccccatgtttctttgagggccacaacagccgagagag

SEQ ID NO: 45 - DNA, 1458 bp, Homo sapiens
  CDS (1)..(1110)
  misc_feature (1)...(1458): n = a,t,c or g
atgtggaggaaagggaagccttatgtgctgtttgtgggaaggtccctgcatggtatcagcgatgcttcttcaccccatttccgaggccgggtgcgttcccgccagccccagtcctcaggcatttctctgagtctccgcccaccgccccccgtctgggtccccatggcgggcactgcggcagcaggtgggcagcctccccgggttagcatgcaggagcacatggccatcgatgtgagcccgggccccatccggcccatccgcctcatttcccactacttcccgcacttttacccttttgcggagcctgccctgcaccctccgaacctgcgccccgcagcggcgtccgccgtccgctctgcaccccagctgcagcccgacccagagccagaaggagactcagacgacagcactgccctgggcaccctggagttcacacttctttttgaagcggacaacagtgccctgcattgcacggctcatcgtgccaagggcctcaagccattggcctcaggctccgcggatgcctatgtcaaagccaatctgctgccaggggccagcaaggccagccagcttcggacacacaccgttcggggcacgagggtacctgtctgggaggagacactcacctatcacggcttcacccgccaggatgctgagtgcaagacccttaggtctgacctgggcggccaccaggctgtgtgtgtgcgaggacccatggtacagcgacagtggcaggcaccttccctgggggagctgcgggtgcccctgaggaagctggtgccaaaccgagccaggagctttgacatctgtctggagaagcggaggctggccaagaggcccaagagcctggacacagcctgtggcatgtccctctatgaggaggaggtggagacagaggtggcctgggaggaatgtgggcacgtcctactgtcactgtgctacagctctcagcagggtggcttgctggtaggtgtgctgcgctgcgcccacctggcccccatggatgccaatggttactcggaccccttcgtgcgcctgaattcttttactcaggcccacgggaggagctggcccagaagacgctgctggtgtctgtgtgggactatgacctaggcacggctgatgacttcattggcggggtgcagctgggcagccatgccagtggggagcgcctgcggcactggcttgagtgcctgggccacagtgaccaccgcctggagctgtggcacccgctggacagcaagcctgtccagctcagcgactagcccatgggccctgcctgccgcctctccactacagctgcctgaaacgtccccacaaaaatgatggcggctggggctgccttaccctcatgcccagccccaagttanagaggtgtttcctctctccccgctttnacattcaccccaccccaaatcatggagccgaaataaacatctccttcaagccaggaaaaaa

SEQ ID NO: 46 - DNA, 1738 bp, Homo sapiens
  CDS (1)..(984)
atgcagacatacagaaagaatgtccagcaaatgatgcagtgtctgatccgcaagcttgctgcgctcagccagtacgaagaagtcctggcaaaaatcagctccacatccacagatcggctcacagttctcaagaccaagccacagtctatacaaagggatatcattactgtctgcaacgacccttacacgttggcccagcagctgactcatatagagctggagaggctcaattatattgggccagaagaatttgttcaggcgttcgtgcagaaggaccctttggataatgacaagagttgctacagtgaacggaagaaaacacgaaacttagaagcttacgtggaatggtttaatcgcctcagctacttggttgctacagaaatctgtatgcctgttaagaaaaaacaccgagcaagaatgattgagtatttcattgacgtagctcgggagtgttttaacattggcaacttcaactccttgatggcgataatctctggtatgaatatgagcccagtctctcgactaaaaaaaacttgggccaaagtgaagactgcaaaatttgacattcttgagcatcagatggacccttcaagcaatttctataattatcgaacagctcttcgtggggcagcacaaaggtctttaactgctcatagtagtagagaaaagattgtgataccattcttcagtctcttaatcaaagatatttatttcctcaatgagggttgtgccaaccgccttcccaatggccatgtcaattttgagaaattttgggaactggccaaacaagtgagtgaatttatgacatggaaacaagtggagtgtccatttgagagggaccggaagatcttgcagtatctgctcacagtaccagtcttcagtgaagatgctctctacttggcttcttatgagagtgaaggacctgaaaatcatatagagaaagacagatggaagtctttaaggtcgagcctcttaggcagagtttaacacatgggagctgcctgcctgctgctgctgctgcttcctgcagatcatggaggggctggcctttgttttctggcatctcgtaccacgaacactcatgaagaccctgcagtcattggagcacccgggtcagcaaagcacacaagctcactcaagaccagatggagaacttatttcctgcagctgacagatagactcagattttgtgagactgaaatgttcactgaagacacttgagaaagaatcctctaaaaatcccggctctgcacattattcatctcctggaatttccatgtgaatcacagctctgcacctggatggagttttcttttgtgtgtgtgtgttttttttaatttggttgaacatttgctgctaatgggacttgcccagctgagtgctggctctgaggaagcccacgtttcttttgttaacttaaatgaagaaaggagtggagggaggggatctaaaacccccccgtttagatcccaaaccttagctcaatcagtattgccagagaggggtaagactggttggaagctgactgcagactttgtttccccttagtatgtgctgtgttgtaaatttttctcctccctcctcctacaaggttttgagttggctgctggttagcaaactcctttttacccatataagttatttaatataataatgaagctcaacactgtggtaggaaaatagccactagaaagaaaataaaaagcagagtttgtcattggactgcttaaaaaaaaaa

SEQ ID NO: 47 - DNA, 4162 bp, Homo sapiens
  CDS (214)..(2538)
ctaagcgagcaatacccgcgcttcggtaagaactgtcacgcttagagcgggccaaccagcttccaccatccagatggcggatcctagattggcagcctgcgtctctctagctaccgtctctatggttcggggaatctccaggtcggggcttgaccggtccgacttttgcgcgtgcgcgagtcctggcgcgtgcccgccctcaagcaaccccagatggtgggtccggaggatgccggagcctgctcgggaagaaaccccaagttgctcccggtgcctgcgccggaccccgtgggccaggacaggaaggtaatccgggccacgggcggctttggcggaggcgtcggcgctgtggagccgccggaggaggctgacgaggaggaggaggctgacgaggaggaggagacgccgcctcggcagctccttcagcgttacctcgcggcggccggggagcagctggagccggggctctgctactgtccgctccccgctggccaggccggcgccccgccgccctcggcagccccacgatcggacgcctgcctgctgggctcgggctccaaacaccgcggcgcggaggtggctgatggccgcgcgccgcggcacgaaggcatgaccaacggcgactcgggttttctgccgggccgggactgtcgcgatctggaagaggctcgcgggctggcgcgcgccggcggccgggagtcgcgccgccgccgcccctacggccgccttcgcctggaggggcctggcgacgaggacgcggacggcgcgggaagcccgtccgattgggcctctccgcttgaggacccgctgcggagctgctgcctggtggccgcggacgcccaggagcccgagggcgcgggcagcgactcgggggacagccccgccagcagctgcagcagtagcgaggactcagagcagcggggagtcggcgccgggggtcccgaggagggcgcgccccctgccacctcggccgagaggactaatgggggtgcggagccgcgcctgggcttttctgacattcacttcaactctcgcaacacgttccaggtgagccgcggtcagagcgcccgcgatcacctgcccccggcggggccgccggtgcccttgcccgccgcggagcagggtcctgcgggggcttcggcccgggctcgacggagtggcggcttcgcggacttcttcaccagaaacctttttccaaaaaggacaaaggaactcaaatcagttgtccatagtgctcctggttggaaattatttggtaaagtccctcctagagagaatcttcagaaaacatccaaaatcattcagcaggaatatgaagcacgaacggggaggacctgtaaaccaccacctcagtcttcaagacgcaagaattttgaatttgagccgctttctaccactgccttgattcttgaggatcgaccatcaaatcttcctgccaaatctgtggaagaagctttacgtcaccgacaagaatacgatgagatggtggctgaggctaaaaaacgagaaattaaggaagcacataaaagaaaaagaatcatgaaagaacgatttaagcaggaagaaaatattgcaagtgcaatggtaatttggatcaatgaaatactgcccaattgggaagtaatgcgtagtacaagaagagttcgagaattgtggtggcagggattgccccctagtgtccgtgggaaagtttggagtctagctgtaggaaatgaactaaatatcactcctgaactttatgaaatcttcctctcaagagcaaaagaacggtggaaaagtttcagtgaaacaagttcagagaatgatacagaaggtgtatctgttgctgatcgagaggccagtctggaattaattaagttggacatatcccgtacatttccatctctctacatctttcagaagggtggtccatatcatgatgtcttgcatagtattttaggggcatacacatgctacaggcctgatgttggttatgtccaagggatgtccttcattgcagcagtactcattctcaatttggaagaggcagatgcctttatcgcatttgccaatctcctgaataagccatgccagttggccttttttcgtgtggatcacagcatgatgttgaaatattttgcaacatttgaagtattctttgaagaaaatctttccaaattatttcttcacttcaaatcttacagtcttacaccagatatatacttgatagactggatcttcacactatatagcaaatcactaccacttgatctggcctgtcgagtctgggatgtattttgcagagatggggaagaatttttatttaggactggattaggaatcctccgattatatgaagatattctcctgcagatggactttattcatatagcacagtttctaactaaattgccagaagatatcacatcggaaaagctgttcagttgtattgcagccattcagatgcagaatagcaccaaaaaatggactcaggtctttgcatctgtaatgaaggatattaaagaaggagacaagaacagtagtcctgctttgaaaagctagtcttcaaaattgacagactaactgacatagaaaaagtggtttttggataaaggttttttgtttcctatgtaaaaggcgtggaagaaaatgttggagatacctaaaagaatcaagaggtggaaaactgctgattttacattttatggctgaagtaaatgaaataagtaacttattgacagtattaataaactattattttgtaggtagagtcatttttcaaaggaaaaagtttaagtggtgagtttatattccacaatttggagtaaacaaaatgcaataaatttttaaaatagctttgaagatacttcaaatttttacatcttttcttttgtaacaggtaccacaaagatattctggaggctacagtacgattgttaaatactactgttaaaccttcaaagtactaatatttcagaacattggttgcaggttctgacccttttggaagatattatagaccagtaatgaacagatttggttgtaaattatttaagtcactgaagatgtcatttatcttcattcacaagttggggcaaattcgagttacctaggaactggaaatgttggtgggagattgtttattgtttgtttagatgtttttccatagtatggtgtccatttgttttttaagggaaattttttgtcttccttaaggagttcctatcactcagagaattttagccattctggttctagtctaacaaattattcatctaataatttgacattaagaaaactataaataactggtagaaggaaagtgctttgcacttcagtggattgaagacttgactttgagagtaagtccaaaaacatatatgatgtttctcagtgataagagtaaaaagtaatgaatcctgagagttcttaaacagcatgctacttggcaagacttcatattttttagttacaattcttccactgtttaactccagtttgaaatttgaaatctaatatgtagctaaatctgtgacttgtaaaactctatgcataatttttcctaatcagtggaaataagaataaaagaaaaaggtaaagttaattttttttctaagtctacatcctatctcttgattcagttgcctgaagaagctgggtaaggagattagtcttgttattgattcttttatgtgtcagtgccatcttaatctcttcacatggtacactaaatgctgcctataacccatcctcatcttctttactcatcattgctttcttcaaggaaggtcttgatactgccctcgtctacctcactatccgctagtctagatagtgactctttggaaaattggtagcctctgaatgagttatccaacttctgcttcctcacattggccactttgcataggttcgggaacttagcaggttttaaatcatcatgcccatggaggtgaaatactttgaggaatgggaacatctcttcactgtgtttttggatcagccttctctcaaccgccaagaaatgcatgatttccctgccaactctaggaagtagtgctgcatgattgaatcattatttgatgaattctttcattgtaacatagggagtcattttcaaaaaggtaggtatggaaccttaaattaattggacttatggaatgtttgcctgtgggcccaacaa

SEQ ID NO: 48 - DNA, 1545 bp, Homo sapiens
  CDS (185)..(703)
gcacgagcgatacgtgagtggcggcggctgctgattgtgttctaggggacggagtaggggaagacgtttgctctcccggaacagcctatctcattcctttctttcgattacccgtggcgcggagagtcagggcggcggctgcggcagcaagggcggcggtggcggcggcggcagctgcagtgacatgtccagcatgaatcccgaatatgattatttattcaagttacttctgattggcgactcaggggttggaaagtcttgccttcttcttaggtttgcagatgatacatatacagaaagctacatcagcacaattggtgtggatttcaaaataagaactatagagttagacgggaaaacaatcaagcttcaaatagagtccttcaataatgttaaacagtggctgcaggaaatagatcgttatgccagtgaaaatgtcaacaaattgttggtagggaacaaatgtgatctgaccacaaagaaagtagtagactacacaacagcgaaggaatttgctgattcccttggaattccgtttttggaaaccagtgctaagaatgcaacgaatgtagaacagtctttcatgacgatggcagctgagattaaaaagcgaatgggtcccggagcaacagctggtggtgctgagaagtccaatgttaaaattcagagcactccagtcaagcagtcaggtggaggttgctgctaaaatttgcctccatccttttctcacagcaatgaatttgcaatctgaacccaagtgaaaaaacaaaattgcctgaattgtactgtatgtagctgcactacaacagattcttaccgtctccacaaaggtcagagattgtaaatggtcaatactgactttttttttattcccttgactcaagacagctaacttcattttcagaactgttttaaacctttgtgtgctggtttataaaataatgtgtgtaatccttgttgctttcctgataccagactgtttcccgtggttggtatagaatatataacggtatgcgatgtataatatcggaatgtaatagatgtcaaggttaagtcttctgaagatgaagttcagacattaggctatcacacagcaaaagcagaggtcttgtccactttcccatggcatacaggttcagatgaccatgtacatcatggtaagacctggatcgggaaacgttcttccctggaacacgttactacatggccaaaataccagtaatatgataaaaagttactcaaacacggcatctcaactagagtggaccgcgacacaacatcggaaccagggtgcaccacacatgacacccaaaccaactcggaggaacgtggccaagcaccgaaagggcacaacctgcgcgaaaacagaaaacacaaacacaagggcaacgcaaaagaaaaacccacagacggagccccacgatagaaggcccagcaggtcccgcacacgagggaccaaaagaaggacagaaaacagcacgagcaagagacagagaaaaccaaagcagaggcagaccaacacacagatccagcaaacaccacacg

SEQ ID NO: 49 - DNA, 3199 bp, Homo sapiens
  CDS (271)..(2058)
atgatcacattcctcatggagggattctgggccaaggaggttatggtcaagagtgcggagtgtgctctccacactggcccctcttcggtggttcttatgtttgagctccttataagaaaggcagtggccaaaaggcactcgggccatgggaagaatgccgtgtcctctgaactggggccaagagtgacaggtggcggcagtcccagctgcatggcccctggtctagaaagacttgagttagacaagcagcagcacacgcctccctacctcatggcgacagaaaatggagcagttgagctgggaattcagaacccatcaacagacaaggcacctaaaggtcccacaggtgaaagacccctggctgcagggaaagaccctggccccccagacccaaagaaagctccggatccacccaccctgaagaaagatgccaaagcccctgcctcagagaaaggggatggtaccctggcccaaccctcaactagcagccaaggccccaaaggagagggtgacaggggcggggggcccgcggagggcagtgctgggcccccggcagccctgccccagcagactgcgacacctgagaccagcgtcaagaagcccaaggctgagcagggagcctcaggcagccaggatcctggaaagcccagggtgggcaagaaggcagcagagggccaagcagcagccaggaggggctcacctgcctttctgcatagccccagctgtcctgccatcatctccagttctgagaagctgctggccaagaagcccccaagcgaggcatcagagctcacctttgaaggggtgcccatgacccacagccccacggatcccaggccagccaaggcagaagaaggaaagaacatcctggcagagagccagaaggaagtgggagagaaaaccccaggccaggctggccaggctaagatgcaaggggacacctcgagggggattgagttccaggctgttccctcagagaaatccgaggtggggcaggccctctgtctcacagccagggaggaggactgcttccagattttggatgattgcccgccacctccggcccccttccctcaccgcatggtggagctgaggaccgggaatgtcagcagtgaattcagtatgaactccaaggaggcgctcggaggtggcaagtttggggcagtctgtacctgcatggagaaagccacaggcctcaagctggcagccaaggtcatcaagaaacagactcccaaagacaaggaaatggtgttgctggagattgaggtcatgaaccagctgaaccaccgcaatctgatccagctgtatgcagccatcgagactccgcatgagatcgtcctgttcatggagtacatcgagggcggagagctcttcgagaggattgtggatgaggactaccatctgaccgaggtggacaccatggtgtttgtcaggcagatctgtgacgggatcctcttcatgcacaagatgagggttttgcacctggacctcaagccagagaacatcctgtgtgtcaacaccaccgggcatttggtgaagatcattgactttggcctggcacggaggtataaccccaacgagaagctgaaggtgaactttgggaccccagagttcctgtcacctgaggtggtgaattatgaccaaatctccgataagacagacatgtggagtatgggggtgatcacctacatgctgctgagcggcctctcccccttcctgggagatgatgacacagagaccctaaacaacgttctatctggcaactggtactttgatgaagagacctttgaggccgtatcagacgaggccaaagactttgtctccaacctcatcgtcaaggaccagagggcccggatgaacgctgcccagtgtctcgcccatccctggctcaacaacctggcggagaaagccaaacgctgtaaccgacgccttaagtcccagatcttgcttaagaaatacctcatgaagaggcgctggaagaaaaacttcattgctgtcagcgctgccaaccgcttcaagaagatcagcagctcgggggcactgatggctctgggggtctgagccctgggcgcagctgaagcctggacgcagccacacagtggccggggctgaagccacacagcccagaaggccagaaaaggcagccagatccccagggcagcctcgttaggacaaggctgtgccaggctgggaggctcggggctccccacgcccccatgcagtgaccgcttccccgatgtgagccgcctcggagtgtggcctggatccatcctgctagcacctccccagacagggctccagcctgtcggccacaccccagactccaggcccccgttgaagccgctcccggttccctccccagctcctcgtctttgaactgccgccgccgtggtgacccctgctttgccccactgggagagtccttagcctgggcctcctcctagctggagtgccatggctggggggtctcagcatgtagggcttctgtggttgtggatgggaggctcctggtggggcagaaaggctgcaacgctgattcctaaggcccagctgccagggaagacagagcaggctttgtgagagaggacctccatgcccccgccacctccccactccagcagataaggccgagcccacaccatctggcccaggctggcccccacccaccttccttgcgaccaccaacacacaggaactctgtgtgagagagagggcgcccagcccaggcctggtggagggggaggggagaagccaagggacacaggagaccacccccgagcttgcctcagggccaagccggcccaacccaaccactcggggcccccatcttgggggtcacccatggcctcagatgatggggtcagcaggcccaggagaattaggaaggccatggggcagcctccagtctgctctcagcttgtgccttgtaaataaatgtacaggttggaaaaaaactgtatctttgaatttgcagaactatcttttgcttcttaaaacaacagcttgaaaacacatttttatgaggaaaagatgtttcttctccagatgtcatcatttcgttgttacatcttatagcctattgataatatgtacaagaatgtcttgtcttttaaaaatgcagagaagcacacaagacaaccatctgaaagtatcccttctttgatcttttggctctttgttgttaactatgcttgtatga

SEQ ID NO: 50 - DNA, 2506 bp, Homo sapiens
  CDS (151)..(2115)
gagccgaccttctgagccctcaagaaagatcagaacagattcatgggtgatttagcctatctgtcccaggccagcgtggctgagtgtgctggctggaggcctctctctctgcttcgagggtagctgagatccaccccggaaaccggcaggatgaagggggcaagtgaggagaagctggcatctgtgtccaacctggtcactgtgtttgagaatagcaggaccccagaagcagcacccagaggccagaggctagaggacgtgcatcaccgccctgagtgcaggcctcccgagtccccaggaccacgggagaagacgaatgtcggggaggccgtggggtctgagcccaggacagtcagcaggaggtacctgaactccctgaagaacaagctgtccagcgaagcctggaggaaatcttgccagcctgtgaccctctcaggatcggggacgcaggagccagagaagaagatcgtccaggagctgctggagacagagcaggcctatgtggcgcgcctccacctgctagaccaggtgtttttccaggagctgctgaagacagcccgcagcagcaaggccttcccagaggatgtggtcagggtcatcttctccaacatctcctccatctatcagttccattctcagttcttcctcccagagctgcagcggcgcctggacgactggacagctaacccccgcatcggtgacgtgatccagaagctggcccccttcctgaagatgtacagtgagtatgtcaagaactttgagcgagcggctgagctgctggccacctggaccgacaagtctccactcttccaggaggttctcactcgcatccagagcagcgaggcttcgggcagcctgaccctgcagcaccacatgctggaaccagtgcagagaattccacgttacgagctgctgctcaaggagtacatccagaagctgccagcccaggccccagaccaggccgatgcccagaaagccctggacatgatcttctcagctgcccagcactccaatgcagccatcactgagatggagcggctgcaggacctgtgggaggtgtaccagcgcctgggcctcgaggacgacatagtagacccctctaacaccctgctccgtgagggcccggtcctcaagatctccttccgccgcaacgaccccatggagcgctaccttttcttgttcaacaacatgctgctctactgtgtgcccagggtgatccaggtgggcgcccagttccaggtgaggacccgcatcgatgtggccgggatgaaggtgcgggagctgatggatgctgagtttccccactccttcctggtgtctgggaagcagcgcaccctggagctgcaagcccggtcccaggaggaaatgatttcctggatgcaggccttccaagcagccattgaccaaatcgagaagcggaatgaaaccttcaaggctgcggcccaggggcctgagggagacatccaggagcaggagctgcagtctgaggagctgggcctccgggcaccgcagtgggtccgggacaagatggtgaccatgtgcatgcgctgccaggagcccttcaacgctctgacgcgccgtcgccaccactgccgggcctgcggctatgtggtgtgtgccaggtgctccgactaccgggccgaactgaaatacgacgacaacaggcccaaccgagtctgcctccactgctacgcattcctcactggaaatgtgctgcctgaggccaaggaggacaagaggcggggcatcctggagaaagggtcctcagccacgcctgaccagagcctgatgtgcagcttcctgcagctcatcggggacaagtggggcaagagcggcccccggggctggtgtgtgatccctcgggatgaccccctcgtgctctatgtctatgctgcccctcaggacatgagggctcacacctccatccccctgctgggctaccaggtgactgttgggccccagggggaccctcgggtcttccagctacagcagtcaggccagctctacaccttcaaggccgagacggaggagctgaagggccgctgggtgaaggccatggagcgggcggccagtggctggagccccagctggcccaacgatggggacctgtccgactgagccactgccagccgctctcctgcccacctctccccaccctgaacccagctcctgccacagactgaccctgtggcctcagtgacccactgccccaagtggtgctttcagagaattgattcagccatctgcgcccaggccacgtgtcccgatctgggattagaaaatatgggtccattcctttctagaaaggggacaaccaagtgtctcagtttgccttgcggggagggggctcctgggccatgggacttccagtgctaaaactgggaaagccccaggtaaccccggactggtggtcaccatagtatggtttttcatttgtatctcctggggagcttttaaagagtactggtgaaaaacacatagtaaattaattttaaaaaaaaaaaaa

SEQ ID NO: 51 - DNA, 2959 bp, Homo sapiens
  CDS (1)..(2814)
atgaacctgtgtggcctcatgcccatcttccccgctcccctcgaccaggtggctgacatggaggagctgaccatctgggaacagcacacggccacactgtccaaggacccccgccggggctttggcattgcgatctctggaggccgagaccggcccggtggatccatggttgtatctgacgtggtacctggagggccggcggagggcaggctacagacaggcgaccacatcgtcatggtgaacggggtttccatggagaatgccacctccgcgtttgccattcagatactcaagacctgcaccaagatggccaacatcacagtgaaacgtccccggaggatccacctgcccgccaccaaagccagcccctccagcccagggcgccaggactcggatgaagacgatgggccccagcgggtggaggaggtggaccagggccggggctatgacggcgactcatccagtggctccggccgctcctgggacgagcgctcccgccggccgaggcctggtcgccggggccgggccggcagccatgggcgtaggagcccaggtggtggctctgaggccaacgggctggccctggtgtccggctttaagcggctgccacggcaggacgtgcagatgaagcctgtgaagtcagtgctggtgaagaggagagacagcgaagagtttggcgtcaagctgggcagtcagatcttcatcaagcacattacagattcgggcctggctgcccggcaccgtgggctgcaggaaggagatctcattctacagatcaacggggtgtctagccagaacctgtcactgaacgacacccggcgactgattgagaagtcagaagggaagctaagcctgctggtgctgagagatcgtgggcagttcctggtgaacattccgcctgctgtcagtgacagcgacagctcgccattggaggacatctcggacctcgcctcggagctatcgcaggcaccaccatcccacatcccaccaccaccccggcatgctcagcggagccccgaggccagccagaccgactctcccgtggagagtccccggcttcggcgggaaagttcagtagattccagaaccatctcggaaccagatgagcaacggtcagagttgcccagggaaagcagctatgacatctacagagtgcccagcagtcagagcatggaggatcgtgggtacagccccgacacgcgtgtggtccgcttcctcaagggcaagagcatcgggctgcggctggcagggggcaatgacgtgggcatcttcgtgtccggggtgcaggcgggcagcccggccgacgggcagggcatccaggagggagatcagattctgcaggtgaatgacgtgccattccagaacctgacacgggaggaggcagtgcagttcctgctggggctgccaccaggcgaggagatggagctggtgacgcagcggaagcaggacattttctggaaaatggtgcagtcccgcgtgggtgactccttctacatccgcactcactttgagctggagcccagtccgccgtctggcctgggcttcacccgtggcgacgtcttccacgtgctggacacgctgcaccccggccccgggcagagccacgcacgaggaggccactggctggcggtgcgcatgggtcgtgacctgcgggagcaagagcggggcatcattcccaaccagagcagggcggagcagctggccagcctggaagctgcccagagggccgtgggagtcgggcccggctcctccgcgggctccaatgctcgggccgagttctggcggctgcggggtctgcgtcgaggagccaagaagaccactcagcggagccgtgaggacctctcagctctgacccgacagggccgctacccgccctacgaacgagtggtgttgcgagaagccagtttcaagcgcccggtagtgatcctgggacccgtggccgacattgctatgcagaagttgactgctgagatgcctgaccagtttgaaatcgcagagactgtgtccaggaccgacagcccctccaagatcatcaaactagacaccgtgcgggtgattgcagaaaaagacaagcatgcgctcctggatgtgaccccctccgccatcgagcgcctcaactatgtgcagtactaccccattgtggtcttcttcatccccgagagccggccggccctcaaggcactgcgccagtggctggcgcctgcctcccgccgcagcacccgtcgcctctacgcacaagcccagaagctgcgaaaacacagcagccacctcttcacagccaccatccctctgaatggcacgagtgacacctggtaccaggagctcaaggccatcattcgagagcagcagacgcggcccatctggacggcggaagatcagctggatggctccttggaggacaacctagacctccctcaccacggcctggccgacagctccgctgacctcagctgcgacagccgcgttaacagcgactacgagacggacggcgagggcggcgcgtacacggatggcgagggctacacagacggcgagggggggccctacacggatgtggatgatgagcccccggctccagccctggcccggtcctcggagcccgtgcaggcagatgagtcccagagcccgagggatcgtgggagaatctcggctcatcagggggcccaggtggacagccgccacccccagggacagtggcgacaggacagcatgcgaacctatgaacgggaagccctgaagaaaaagtttatgcgagtacatgatgcggagtcctccgatgaagacggctatgactggggtccggccactgacctgtgacctctcgaaggctgccagctggtccgtcctccttctccctccctggggctgggactcagtttcccatacagaacccacaaccttacctccctccgcctggtctttaataaacagagtattttcacagcaaaaaaaaaaaaaa

SEQ ID NO: 52 - DNA, 2776 bp, Homo sapiens
  CDS (424)..(2091)
tagtattaaacattttcaaagttacttgccaacatctagaaagataccaggttttctataaaaaagaaaactggatttctggatgcttcttaaaaatcaggaagtctggcagcctgagcccacatcggctggagctgagccgcacctgcgagttgcatctgggatctccagttcaccggcccctaagctcctgagggttggcctgaccctgaggttgcctgtcaatcaccatttcttccctccactccttgtgttacctgcctggtcctgcggggttggcaacaagctcaggagcccacctcgggtggttttggaggtgccgtgcacactgctgattgggaggctggacgctgccagtctgtccggagtttcctttacccctgagtagcccccagactgaactggcagcgagtggaggccacgatgcatggttctcttgaagctttgctcttcctgccccaagtcaccctgtcccttgcccacgcccatttgatctgctcaaatgcacaactggagatgtgtgtctttccccacaggtttcttggcgatctcacaacagaaggaataaacaagccaggattttacaagggcccagccggctcccaggtgaccctgagcagcctggggaaccagacacgagtgctgctggaggagcaggctcggcacctgctgaacgagcaggaacacaccaccatggcctactacctggatgagtaccgtggcggcagcgtctctgtggaggccctcgtcatggccctgttcaagctgctcaacacccacgccaagttctcactcctctctgaggtgagaggcaccatttccccgcaagacctagaacgcttcgaccacctggtgctgaggcgtgagattgagtccatgaaggcgcggcagcccccaggccccggggctggggacacctactccatggtctcctacagtgacacgggttcatccacaggcagccacggcacctccaccaccgtcagctcggccaggaacactctggacctggaggaaactggcgaggctgtccagggcaatatcaacgccctcccagatgtgtccgtggatgatgtcagatccacctcccaggggctgtcaagcttcaagccactgcctcgcccaccacctctggcccaaggcaacgacctcccactaggccagccaaggaagctggggagagaggacctccagccaccttcctccacgccttcctgctcgggcactgtcttctcggctccacagaaccgcagcccgccagcgggcaccgcacccaccccagggacctcctctgcacaggacttgccctcttcccccatctatgcctccgtctcccctgccaaccccagctccaagaggccgctggacgcccatctggccctggtcaaccaacaccccatcggccccttcccacgggtccagtcacccccgcacctgaaaagcccctctgcagaggccacagtggctgggggctgccttctgcccccatcaccctctggccacccagaccagacagtcacaaaccagcactttgtcatggtggaggtccaccgccccgacagcgagccagacgtcaatgaagtgagggcgctgccccagacgcgcacagcctctacgctctcccagctctcggacagcgggcagactctaagcgaggacagtggtgtggatgctggcgaggcagaggccagcgccccaggccgaggaaggcagtcggcgtccaccaagagcaggagtagcaaggagctgcctcggaacgagaggcccacagatggggccaacaaaccgccaggacttctggagcccacgtccactctggtccgtgtgaagaaaagtgcggccaccctgggcatcgccatcgagggtggcgccaacacccgccagcccctgcctaggattgtcactattcagagaggcggctcagctcacaactgtgggcagctcaaggtgggccacgtgattctggaagtgaatgggctgacgcttcggggcaaggagcaccgggaggccgcccgcattatcgccgaggccttcaagactaaggaccgtgactacattgactttctggtcactgagttcaatgtgatgctctagaggccaaggcctgagggcctcccaccactgcccagcccctggtcccagtccctttccaccgttggcttcatcaagctccttgcggggttggggctgcatggccagggtggcaggaagacatcccccctccatcccagcccactggaccagaactgggagaggatgagagcaggacaaggcagacagaaggtcaggtcaggaactggtgctgtactgggtacacagtaggcgcccaggacaagtgggttgcaagacaggaagaaaggaaaaggaagggcagagtgctggtttctccaggttgggttgggggcactgctgtcccccctccagctaggacccagcccatccccagatgcctgagcctttgtccaaagtgaggtcactcgagaattcatggacacggcccccagtcagggggcatcttgcaagacctttagtgccacaaataagcatcgagcacctccccattcacacccccattcctcctggctccttatcccccatggtgtttattatttatttccctccccatgcccctggggaccccaaggccccagcttccctctgcacccccagcctatcccagaggccttgcaggtgaccagcagtgtcattgtatttatatacagagcttatgactttaatttttcaataaagaaatctgaacaagaaaaaaaaaaaa

SEQ ID NO: 53 - DNA, 2490 bp, Homo sapiens
  CDS (77)..(1855)
aagtggctccaaggctgcaggtgtgaggggcgtgcccagggctcggcccgcgccgccccatgtgacccggtccgacatggtgtcgcctcctcccggggcggcggcggtggcggctcgggctgggctccgcgtcgggccggccccgcggccgctcatgggcagccagggccgctcggggccccccgggaacggcgggcccggcgagggcgagggcggagaggcgaggaagctgcaggaagggagggtggcgagggggaagcgaaggaaggggaaggggaagggaaaagcgagagcggggcaaggcggaagaggaagcggggcggaagggaagcccgggccgcagacggcgaaggaggcagccgggccgggggctgacgcgggagcgagggcatgcccaagggaggaagcagagggaggcagaagcgtggaggaaggggcgagaggcatcgtcaagggagtcgaggggagcgcaggggccgggaaggaggcacaaggaagagagtatgggaagaaggaggaatggagggtcagggctaggcggcgggagggcgccaggccgggaagagcacagggacgagggggtcaggcttgggccgacatcgcggggacaggggaggccatggcggcggcggccggggaggaggaggaggaggaggaggcggctcgggagtcggctgcccgcccggccgcggggcctgcgctctggcgcctgccggaggagctgctgctgctcatctgctcctacctggacatgcgggccctcggccgcctggcccaggtgtgccgctggctgcggcgcttcaccagctgcgatctgctctggcgccggatagcccgggcctcgctcaactccggcttcacgcggctcggcaccgacctgatgaccagtgtcccagtgaaggaacgagtgaaggtgtctcagaactggagactggggcgctgccgagaggggattctgctgaagtggagatgcagtcagatgccctggatgcagctagaggatgattctctgtacatatcccaggctaatttcatcctggcctaccagttccgtccagatggtgccagcttgaatcgtcggcctctgggagtctttgctgggcatgatgaggacgtttgccactttgtgctggccaactcgcatattgttagtgcaggaggggatgggaagattggcattcataagattcacagcaccttcactgtcaagtactcggctcatgaacaggaggtgaactgtgtggattgcaaagggggcatcattgtgagtggctccagggacaggacggccaaggtgtggcctttggcctcaggccggctggggcagtgcttacacaccatccagactgaagaccgagtctggtccattgctatcagcccattactcagctcttttgtgacagggacggcttgttgcgggcacttctcacccctgagaatctgggacctcaacagtgggcagctgatgacacacttgggcagtgactttcccccaggggctggggtgctggatgtcatgtatgagtcccctttcacactgctgtcctgtggctatgacacctatgttcgctactgggacctccgcaccagcgtccggaaatgtgtcatggagtgggaggagccccacgacagcaccctgtactgcctgcagacagatggcaaccacctgctggccacaggttcctcctactacggtgttgtacggctgtgggaccggcgtcaaagggcctgcctgcacgccttcccgctgacgtcgactcccctcagcagccctgtgtactgcctgcgtctcaccaccaagcatctctatgctgccctgtcttacaacctccacgtcctggattttcaaaacccatgaccgtcagggccacccctgcctctgggccagggaaaccagctactcagggacttctcttgcctggagggtgcagtgatagctcctcctcactgccccactgtgctcctgggcctgtgaccccagtgctcaggcaccttgcactagaggcttctgactcctgggactttggagcttaccagagatgcagtccctcccaggaacctgttggagaggcaggacctgctgctttagagtgcggctgaacccgggccttgcgtccctgtttggccagagcaaggatctggcctggagaggcccatcctataccccttattagagccatgacagcctacagagtgaggtgaggtgctcccaccttcccagatggttcctttctgccccttcctggaaggaaaggtgaggctgccaatagcctcctggcaccagccagacctcacccttgaccaacctctcggggctgggggttcattcctggggcactgtggcctggttttgctttgaaaccaagaaagagcaaagggaacccagcagttctgagtgagttctgagccagccctacctcaggctggctgttgagacatgctacaattttcatttttgtaaaaataaagcttgattgttcacaaaaaaaa

SEQ ID NO: 54 - DNA, 2394 bp, Homo sapiens
  CDS (77)..(1759)
aagtggctccaaggctgcaggtgtgaggggcgtgcccagggctcggcccgcgccgccccatgtgacccggtccgacatggtgtcgcctcctcccggggcggcggcggtggcggctcgggctgggctccgcgtcgggccggccccgcggccgctcatgggcagccagggccgctcggggccccccgggaacggcgggcccggcgagggcgagggcggagaggcgaggaagctgcaggaagggagggtggcgagggggaagcgaaggaaggggaaggggaagggaaaagcgagagcggggcaaggcggaagaggaagcggggcggaagggaagcccgggccgcagacggcgaaggaggcagccgggccgggggctgacgcgggagcgagggcatgcccaagggaggaagcagagggaggcagaagcgtggaggaaggggcgagaggcatcgtcaagggagtcgaggggagcgcaggggccgggaaggaggcacaaggaagagagtatgggaagaaggaggaatggagggtcagggctaggcggcgggagggcgccaggccgggaagagcacagggacgagggggtcaggcttgggccgacatcgcggggacaggggaggccatggcggcggcggccggggaggaggaggaggaggaggaggcggctcgggagtcggctgcccgcccggccgcggggcctgcgctctggcgcctgccggaggagctgctgctgctcatctgctcctacctggacatgcgggccctcggccgcctggcccaggtgtgccgctggctgcggcgcttcaccagctgcgatctgctctggcgccggatagcccgggcctcgctcaactccggcttcacgcggctcggcaccgaccttcagatgccctggatgcagctagaggatgattctctgtacatatcccaggctaatttcatcctggcctaccagttccgtccagatggtgccagcttgaatcgtcggcctctgggagtctttgctgggcatgatgaggacgtttgccactttgtgctggccaactcgcatattgttagtgcaggaggggatgggaagattggcattcataagattcacagcaccttcactgtcaagtactcggctcatgaacaggaggtgaactgtgtggattgcaaagggggcatcattgtgagtggctccagggacaggacggccaaggtgtggcctttggcctcaggccggctggggcagtgcttacacaccatccagactgaagaccgagtctggtccattgctatcagcccattactcagctcttttgtgacagggacggcttgttgcgggcacttctcacccctgagaatctgggacctcaacagtgggcagctgatgacacacttgggcagtgactttcccccaggggctggggtgctggatgtcatgtatgagtcccctttcacactgctgtcctgtggctatgacacctatgttcgctactgggacctccgcaccagcgtccggaaatgtgtcatggagtgggaggagccccacgacagcaccctgtactgcctgcagacagatggcaaccacctgctggccacaggttcctcctactacggtgttgtacggctgtgggaccggcgtcaaagggcctgcctgcacgccttcccgctgacgtcgactcccctcagcagccctgtgtactgcctgcgtctcaccaccaagcatctctatgctgccctgtcttacaacctccacgtcctggattttcaaaacccatgaccgtcagggccacccctgcctctgggccagggaaaccagctactcagggacttctcttgcctggagggtgcagtgatagctcctcctcactgccccactgtgctcctgggcctgtgaccccagtgctcaggcaccttgcactagaggcttctgactcctgggactttggagcttaccagagatgcagtccctcccaggaacctgttggagaggcaggacctgctgctttagagtgcggctgaacccgggccttgcgtccctgtttggccagagcaaggatctggcctggagaggcccatcctataccccttattagagccatgacagcctacagagtgaggtgaggtgctcccaccttcccagatggttcctttctgccccttcctggaaggaaaggtgaggctgccaatagcctcctggcaccagccagacctcacccttgaccaacctctcggggctgggggttcattcctggggcactgtggcctggttttgctttgaaaccaagaaagagcaaagggaacccagcagttctgagtgagttctgagccagccctacctcaggctggctgttgagacatgctacaattttcatttttgtaaaaataaagcttgattgttcacaaaaaaaa

SEQ ID NO: 55 - DNA, 2121 bp, Homo sapiens
  CDS (1)..(1893)
atggggcgggggccgcccgcagggccgggcggggctgtgctgccatctggagccgctgccgccggcggccactgtcagggcgcgagcggctggagcgcacgcagggctggagcgagtgcagccgccgccgccgccgacaccgcggcacatgggccggccccgccgctgccgtcgcccctagccccagcagccctggtctcgcagcctcctgcggctctggtcgcccgaccagccatgtctctcggcggagcctccgagcgcagcgtcccggccaccaagattgaaattaccgtgtcctgccggaacctgctagaccttgataccttctccaagtccgaccccatggtggtgctttacacgcagagccgggccagccaggagtggcgggagttcggacggaccgaggtgattgataacacgctgaacccagacttcgtgcgcaaattcgtcctcgactatttctttgaggaaaagcaaaatctgcgcttcgatgtgtacaacgtggactccaaaaccaacatctccaaaccgaaggatttcctgggacaagcgttcctggccctgggagaggtgattggaggccagggcagccgagtagagcgaaccctcacgggtgtaccaggcaagaagtgtgggaccatattgctgactgcagaagagcttagcaattgtcgggacattgccaccatgcagctgtgtgcaaacaagctggacaagaaggacttctttgggaaatcagaccccttccttgtgttctacaggagcaatgaggatggcacgttcaccatctgccacaagacagaggttgtgaaaaacacgctgaatcctgtgtggcagcccttcagcatccctgtgcgggctctgtgcaatggagactatgacagaacggtgaagattgatgtgtacgactgggaccgggatggaagccacgatttcattggtgagttcaccaccagctaccgggagctgagcaaggcccagaaccagttcacagtatatgaggttcttaaccctcggaagaaatgtaagaagaagaaatatgtcaactcaggaactgtgacgctgctctccttctctgtggactctgaattcacttttgttgattacatcaagggagggacacagctgaacttcacagtagccattgacttcacggcttccaatgggaatcctctgcagcctacctccctgcactacatgagtccctaccagctcagcgcctatgccatggccctcaaggcagtgggagagatcatccaggactatgacagtgataagctcttcccagcttatggctttggggccaagctgcccccagagggacggatctcccaccagttccccctgaacaacaatgatgaggaccccaactgtgcgggcatcgagggtgtgctggagagctatttccagagcctgcgcacagtgcagctctatgggcccacctactttgctcctgtcatcaaccaagtggccagggctgcagccaagatctctgatggctcccagtactatgttctgctcatcatcactgatggggtcatctctgacatgacgcagaccaaggaggccatcgtcagcgcctcctcattgcccatgtctatcattatcgtcggtgtaggaccagccatgtttgaggcaatggaagagttggacggtgatgatgtgcgcgtgtcctctaggggacgctacgcagagcgggacatcgttcagttcgtcccattccgagactatgttgaccggtcggggaaccaggtgttgagcatggcccgactggccaaggatgtgctggccgagatcccggagcagctgctgtcctatatgcgcaccagagacatccagcctcggcccccaccccctgccaaccccagcccgatcccagctccagagcagccctgaggattccacatatccaatgcctcacagtctgcaagcctgctcacccactgcttctgctttaagccagaggcacctggaaccctggacttcactgggagggccaacttggaggatcagtgctggctgacaagccctccgcctccttgcctgcagagggcctggcactatcaccacctctctgccttcatgccaataataaagctgatctttattccaaaaaaaaaa

SEQ ID NO: 56 - DNA, 4447 bp, Homo sapiens
  CDS (371)..(1786)
gatgcccccgccaggggggatgcccggcaccgtgcgtccgcggaggccaagatgcagcggccaggggccggcagcctgcgaggggaggcagcttccgccggggccgggctgctgcacagtctgagcggccgggactgcgcgcttcagagcctggagcatcccagtcgctggggccgagacgccgccgccgccgccgttcccgctttctcccgcgagccgggccagtagctttgctagctggccttcccgtggaggcgttttccagccccagcgcggggagacatgcctgaatttgggagcgatgtgactctcagcctcccacttcacccggggacgcaggcttgctgaagcccgagacaggagggggaccatgggagggacgcaagtcaaatgcctgacttcacccagtccaatccacagtgcaaagagcgagtccattataacccagtcagaagagaaggcagattttgtgattattcccgctgaaggaatagagaacagaacagaagggacagattctccattatctcgagactggcggccagggagccctggaacctatctggagacctcatgggaagaacagctgttggaacaacaagaatatttagaaaaagaaatggaggaagcaaagaaaatgatatcaggactacaggccttactgctcaatggatccttacctgaagatgaacaggagaggcccttggccctctgtgaaccaggtgtcaatcccgaggaacaactgattataatccaaagtcgtctggatcagagtatggaggagaatcaggacttaaagaaggaactgctgaaatgtaaacaagaagccagaaacttacaggggataaaggatgccttgcagcagagattgactcagcaggacacatctgttcttcagctcaaacaagagctactgagggcaaatatggacaaagatgagctgcacaaccagaatgtggatctgcagaggaagctagatgagaggaaccggctcttgggagaatataaaaaagagctggggcagaaggatcgccttcttcagcagcaccaggccaagttagaagaagcactccggaaactctctgatgtcagttaccaccaggtggatctagagcgagagctagaacacaaagatgtcctcttggctcactgtatgaaaagagaggcagatgaggcgaccaactacaacagtcacaactctcaaagcaatggttttctccttccaacggcaggaaaaggagctacttcagtcagcaacagagggaccagcgacctgcagcttgttcgagatgctctccgcagcctgcgcaacagcttcagtggccacgatcctcagcaccacactattgacagcttggagcagggcatttctagcctcatggagcgcctgcatgttatggagacgcagaagaaacaagaaagaaaggttcgggtcaagtcacccagaactcaagtaggtagtgaataccgggagtcctggccccctaactcaaagttgcctcactcacagagctctccaactgtcagcagcacctgtactaaagtgctctatttcactgaccggtcacttacgcccttcatggtcaatataccaaagaggttggaggaggtgacgttaaaggattttaaagcagctattgatcgggaaggaaatcaccggtatcacttcaaagcactggatcctgagtttggcactgtcaaagaggagattttccatgatgatgatgccatccctggatgggaagggaaaattgtagcttgggtggaagaagaccatggagagaattaatgccaagtatcagattgagggcttatggaacctggtcactccctggctgcttcactcaggaaagggaactaaaaccagaatacactaagaagtttctagtttgtgtgccaaaacagaagcttctccaagcacgatggccacaggtcagtcctctttctgtgcctggcatatctggtacttaacaattctgtccaaactgtagaccatgggttcatctggagtaccttggtccgtgggacaccacagtgttctatactactcttgaggacaacaaaccgaaggccttaacgatgcggattggttgatcccgcctctgtaggggcatgggctgctattatctggaaattaggaattggatgcatcattcctgtgtgttacagtattattttaattggcctcaatggttgcagcaatcagagtcccagcgtttgtactcacagacaaggcaaaggtaccagcttttctgtttctttgaacctactgcaaaccaagaataactcatgaggtggtaccaaagatgaaagcccagacttcagtaatcttttgaaccagacgtggatggtgctgaattgttgcttggatggaaaaagggctgcccatgttgtgctacactatgctaaaactgtaatttagtaagaccttgggctgcctcttctgtcttaactggttctgcagcttgtccttttgcccacatagggcctatttcatgtactgttagttttctctggggactctttaactttagagccatttctttttcttcaaactgatgaacttttgtttgaaaggcataaggagtgaaaagctccttgaaaatccaggcgggtatggaaaggtgctgctacccatatctttttgactttctttgtttcatgactttaactcatggcatctcctttgtagtaaaaggagacagaccattaatttcagcatttctttgtgatttataagtactgagcatgaagtacttgtctgcccctcatttcaaggccagagttattttctatttatgtattagtctaggctgatcttttagggcacaatagaaaccatggggcgtggagcatgagttgtgaatggcagggatcattctgggtaaaaaaaacctagaatcatttctgatgtgcaacattgtcaagtgaagaagctaacagttcaactaccgagattatttgataacctgggttttctcattcatccatcaagcaccatcaaccagtcagccattattatttatatatgtattaccaaaagcagtctatctgcctgtgacctccaatgtacactgccaaacacaagagtaggacacatctgttctgggttcttgacctatctgtctccaattcatctccccttttcagccatttcaacaaactactctttggagctctgagatgacatcttgttgttttatatagatgtatcttttaaaaatagttcacgtttggagaattcttttgtactcatttgctttttgtctgagaaccatgtctatttttataactggagtgtgagttctgtatcttctcacattctgtatactgtatccattttctagagaacccagtagcttttatacagtctcttcttaccaccccttgtggtttcagaacaagctttattttattacgagtatattaatgacaactaattcctgttccaattctacctgttttagttgtgaaggtagttttgtgtaatccagttgattgctcctctggcagagagaaggagctcaaaagatacttgatgtctttcatgtaagtttacctggtcttttcctattgaagaatttttcatcagaaacgactgggaaagtttgggaaagtcagcaaaagaaagaatgcatttcgaaagcaaacagaagaaaaaagtatattctcacagtttttccccaggaagtctggagaaaaagtcctcatgtcaccaatttctctgttgcatgaattttagtgttttgctataagacagcatgagggctatcaggccaaaattcattattgtatttccaatacagtttgtcttgaatgtctgtctcttaaaccagtttttacttgtcagttttctctcagcaaacagtcttactattatgtggaatttaacttttcagagaaaatttccaaagtcctctaccttatttggcttttatctgtgtcttttggaaaaggagctgcatggcctcagtgcctccataaaaagcttaagttgagttcatgggagaacattaagatcgttttttttcccttttagctcggtaatctcatgtaccacaggtaatgaccaagcatctctgctagaggatgtaactctcataactcctgtgtaaaatgaggatcctgttggtgatcctcattccagtttccaaagcgagaggagccttctgagcagaagtatgcaagactgattctgtttggaacagtttcctatttggctgcattctaggaggcctcctgacttattcatagtattgtcgcctggtggcattggtgtggggtagcttgtcctgctacttgctaaagttctctttctttgagaaaactgaggaaccagaatgcttagagttcataaaataatctctaaaccatgttaggttaaaacaaaatgaccatctcacaaaaacgagtttagttgaatgctcaattccttacaaaatcttca

SEQ ID NO: 57 - DNA, 4274 bp, Homo sapiens
  CDS (252)..(3746)
aaggatccttaattaaattaatccccccccccccccccccgcgctcctcccggacgccgaggacctaccaccgcgacttcgccccgcccggcgcgggcccaggaccctgatgtcgcttttgaacagcccctgcacctggcagccagcgagctactgtagtaggcattgccgactgtttgcataccggatgggagtgacagtgtaatagaaaaacaagcaagaaaccttttaggttacctccagccgctgccatgcccaactcagtgctgtgggcggtggacctcttcgggagagtgtacacgctgtccacagcaggccagtactgggaaatgtgcaaggactcccagctggagttcaagcgcgtcagcgccaccacgcagtgctgctggggcattgcctgtgacaaccaggtctacgtgtatgtgtgtgccagcgatgtccccatccgccgccgagaggaggcctatgagaatcagcgctggaatcccatgggcggcttctgtgagaagctcctgctgagtgaccgctgggggtggagtgacgtgagtgggctccagcaccggccgctggacagggtggcactgccctcgccgcactgggagtgggagtctgactggtacgtggatgagaattttggaggtgaacccactgagaaaggggggtggacgtacgccatcgactttcccgccacctacacgaaagacaagaagtggaattcttgtgtgcggcgccggaagtggatccggtacaggagatacaagtcccgggacatctgggccaagatcccctcgaaggatgaccccaaggagctgcccgaccccttcaacgacctctctgtagggggctgggagatcacggaggagcctgtgggccgcctgtcagtgtgggctgtgtctctgcagggcaaggtgtggtacagagaggacgtcagccactccaaccccgaagggtcctcctggtccctgctggacacccccggggaggtggttcagatcagctgtgggccccacgacctcctgtgggccacactctgggagggacaggccctggtccgggaaggaatcaacaggagcaatcccaaaggaagttcctggtccatcgtggagcctcctggatctgaaaacggggtcatgcacatctcggtgggagtcagcgtggtctgggctgtcaccaaggactggaaggtgtggttccgaagaggcgtcaactctcacaatccctgcggcaccagttggattgagatggttggtgagatgacgatggtgaacgtgggaatgaacgaccaggtgtggggcattggctgtgaggaccgagccgtgtacttccggcagggtgtcacccccagcgagctcagtgggaagacctggaaagccatcatcgcggcccgagagtgtgaccggtcacactctggcagctcgtctagtctcctcagtgccggctgcttcttcggtgatgaggtgaggggtagtggcgagtctgcccccagcgacaccgatgcctcctcggaagtcgagagaccagggcctggccagattctccctgcagaacctctagacgattccaagaatgccacagggaactcagcctcaggcctgggggctggcaggaccgcagaagataccgtggaagatgcctgcccagccgagggcagcagggaggccagacccaacacgcaccccggcccggcccccaccccggccgagctgccctggaccaatattgacctcaaggaggccaagaaagtgcccagccactcggccgctggcttccccgagaccaccagcctctcctctctggggctcctcccactgggcttggaggagccgtatggggtggatgaccacccgctgtgggcctgggtgtcgggaggcggctgcgtggtggaggcatgtgccatgcccagatggttcactgtccaggcgggcctgtcctcctcggtacacatgctgtccctgtccatcacgccggcccagaccgctgcctggaggaagcagatcttccagcagctcacggaaaggaccaagcgggagctggagaacttcagacactacgagcaggccgtggagcagtcggtgtgggtgaagaccggggcgctgcagtggtggtgcgactggaagccccacaagtgggtggacgtgcgcttggccctggagcagttcacggggcacgacggcgtccgggacagcatcctcttcatctactatgtggtccacgaggagaagaagtacatccacatattcctgaatgaggtggtggcgctggtcccagtgctgaacgagaccaagcactcctttgccctgtacacccctgagcggacacggcagaggtggccggtgcgtctggctgctgccaccgagcaggacatgaatgactggctcgccctgctcagcctgtcttgctgcgagagccggaaggtgcagggccgcccgtccccgcaggccatctggtccatcacctgcaagggggacatcttcgtgagcgagcccagcccagacctggaggcccacgagcaccccctgccctgcgaccagatgttttggcggcagatgggaggccacctgcggatggtggaggccaacagccggggcgtggtgtggggcatcggctatgaccacacggcctgggtatacacaggcggctatggaggcggctgcttccaaggcctggccagcagcaccagtaacatctacacgcagtcagacgtgaagtgtgttcacatctatgagaaccagcgctggaaccccgtcacaggctacaccagcaggggtctgcccacggaccggtacatgtggagcgatgcctcggggctgcaggagtgcacgaaggctggcacgaagcccccgtccctgcagtgggcctgggtttccgactggttcgtggatttcagcgttccggggggcacggaccaggaggggtggcagtatgccagcgacttccctgcctcataccatgggtccaaaacgatgaaggattttgtgaggaggaggtgctgggccagaaaatgcaagctggtgaccagtgggccctggctggaggtgccccccatcgccctcagggacgtgtccatcatcccggagagcccgggtgccgaggggagtgggcacagcatcgccctctgggccgtcagcgacaagggggatgtgctgtgccgcctgggcgtgtcggagctcaaccctgcgggctcctcctggctgcacgttggcaccgaccagcccttcgcctccatctccatcggggcctgctaccaggtgtgggccgtggcaagggacggctccgccttctaccggggatccgtgtacccctcgcagccagccggtgactgctggtaccacatcccgtccccaccgagacagaggctgaagcaggtgtccgcggggcagacgtcggtgtatgccctggatgagaatggaaacctgtggtatcgccaagggatcacgcccagctacccgcagggctccagctgggagcacgtgtccaacaacgtgtgccgagtgtccgtggggcccctggaccaggtctgggtgatcgccaacaaagtgcagggcagccacagcctgagccgggggacagtgtgtcatcgcaccggcgtgcagcctcacgagcccaagggccacggctgggactacggcatcgggggaggctgggaccatatctctgtccgggccaatgccaccagggccccccggagctcgtcccaggagcaggagccgagtgccccaccagaggcccatggccccgtctgctgctgaggcccccccacacacctacatgcagggacggtgcccagtttgggggatcaaggctgagccattcttgtgctggagtgtgcaccgtgggagcaatgtggcccaggtggactcaggagggaacctggccccaaggctgcggccacttcagaggcactggctgagacggccctgaaatgtgaagctccgcggacactcccacacgtgtccccgtctgcgaggagtcccggggtgtggggcatggggtggggctgcacctcccagaggcccctcccacccttcccttcccctctcccttctgcctttccaggactagaaccgggaacctggagccctccgggaacgccggccctggggcagcagagccaggatggagccctcctgagctggcatctcagacagcacccgggcccgccacccctcaccaagagagatggccatggggctcagggcctctttaccatgtgcagtgaccatttctcagagcaggacttgcaaagaggctttaatttcaaaagtgaaggaagg

SEQ ID NO: 58 - DNA, 1499 bp, Homo sapiens
  CDS (432)..(1496)
tggtagtaagggggatattcagggacctcccccgggtccgggcagtcgccggtgcccgagggagccccatcggccactgtgccttgcgggcagtacttggggtcatatatctgccggcccaggccgaagacctggccgctctggttggcgccctgcgtgtagcccatctgcagggacatggaggagttgtcacacttgtcggttcccagcttggtatcatagatgtgccgccgggtcccgggagccgtcatgcccacctggctggcgcacttgttcgtgcccatctggaggctgatggtcgagtggtccatggggggcaggatatggttcttggggtcatagagatgccttctcgtgccgtaggcagtcatgcccgactggctggcgcatttgttggtgcccatctgcagcccgaggatgcactggccagcatgagctccacgcagttcaacaagggcccctcatatgggctgtgggcggacgtccagaaccagcttctgtccaaatatgactcccagaaggaggcagagctccgcagctggatcaagggactcacaggactcttcatccgccccgacttccagaagggcctgaaggacgggattattttatgcacactcgtgaacaaactgcagccgggctcagtccccaagatcaacggcttccgtgtagaactggcaccagctagaaaacctctccaacatcctcaaggcaatggtcagctacggcatgatcccgtggacctatttgaggccaacgacctgtttgagagtgggaacaatatgcaggtgcgggtgtctcttctcgccctggcagggaaggccaagactaaggggctgcagagcggggtggacatccgtgacaagtactcagagaagcagaacttcaacgacaccaccatgaaggccaggctgtgcgtcatccggctgcagattaccaacaaatgtgccagccagtcaggcatgaccgcatacgtcacgaggaggcatctctacgaccccaagaaccgcatcctgccccccatggacaactcgaccatcagcctccggatgggtacaaacaagtgcgccagccaggtgggcatgacggctcccgggaaccagtggcacatctatgacaccaagttgggaatcgacaagtgtgagaactcctccatgtccctgaagatgggctacacgcaggtcgccaatcacagcagacaggtctttggcctaggccggcaaatatatgaacccaagtaccagccgggagtagtactacgggagagaaaagctgtacatgtcccaaatgaaggaaagcctttaggtatcagtcatttcttatgcgacattatgaaaattcacactggggagaaaccttatgaatgtaacaaaagtcagaaaggctttagatcttccctacaccttaataaacatttaagaaagaacactttggagaagccctatggatgtaaggaatgtgggaaagccttcagcaagcctcaaaacatgcacatataa

SEQ ID NO: 59 - DNA, 1314 bp, Homo sapiens
  CDS (186)..(1097)
tggtgggttctggggtctacggcctaggggccggggaagtttgcgccgccgcgaccagtgctgcgatcccgagccgggctccagccccgaggaccaggggtcgggcgggcctgcctacggaaccccgcgggccagcagcagtcgtctcgcgtcctcctgcttggaaaagtgtttaagcttctaaaatgtcatctatcaagcacctggtttatgcagttattcgtttcttacgggaacaaagtcagatggacacttacacctcggatgaacaagaaagtttggaagttgcaattcagtgcttggagacagtttttaagatcagcccagaagatacacacctagcagtttcacagcctttgacagaaatgtttaccagttccttctgtaagaatgacgttctgcccctttcaaactcagtgcctgaagatgtgggaaaagctgaccaattaaaagatgaaggcaataaccacatgaaagaagaaaattatgctgctgcagtggattgttacacacaggcaatagaattggatcccaataatgcagtttactattgcaacagggctgctgctcagagcaaattaggtcactacacagatgcgataaaggattgtgaaaaagcaatagcaattgattcaaagtacagcaaggcctatgggagaatggggctggccctcactgccttgaataaatttgaagaagcagttacaagttatcaaaaggcattagatcttgaccctgaaaatgattcctataagtcaaatctgaaaatagcagaacagaagttaagagaggtatccagtcctacaggaactggactgagctttgacatggctagcttgataaataatccagccttcattagtatggcggcaagtttaatgcagaaccctcaagttcaacagctaatgtcaggaatgatgacaaatgccattgggggacctgctgctggagttgggggcctaactgacctgtcaagcctcatccaagcgggacagcagtttgctcagcagatacagcaacaaaatcctgaacttatagagcaactgagaaatcacatccggagcagatcattcagcagcagcgctgaagagcattcctgatttaaccaggggctcaagcccaagatacaaatggtttatggctatgaatgaagtatttgttgtagatagtaccccctccctccttcaaaaaaccaaacaccatatctgatgtgtgaaaataatggaggaaaacctcttgtgtatattcttaaagaataaatctgtttagacaataggtttatcacaaacaaactcaaaacataaaaaaaaaaaa

SEQ ID NO: 60 - DNA, 2285 bp, Homo sapiens
  CDS (366)..(1643)
tccacagcctgggccgggccgcccgggacgctgaggcggcggcggcggccgagggggccggtcttgcgctccccaggcccgcgcgcctgagcccaggttgccattcgccgcacaggccctattctctcagccctcggcggcgatgaggcgctgaggcggctgccggcgctgcgccggagcttaggactcggaagcggccgggccgagggcgtggggtgccggcctccctgaggcgagggtagcgggtgcatggcgcagtaacggcccctatctctctccccgctccccagcctcgggcgaggccgtccggccgctacccctcctgctcggccgccgcagtcgccgtcgccgccgccgccgccgccatggccaatgacagcggcgggcccggcgggccgagcccgagcgagcgagaccggcagtactgcgagctgtgcgggaagatggagaacctgctgcgctgcagccgctgccgcagctccttctactgctgcaaggagcaccagcgtcaggactggaagaagcacaagctcgtgtgccagggcagcgagggcgccctcggccacggagtgggcccacaccagcattccggccccgcgccgccggctgcagtgccgccgcccagggccggggcccgggagcccaggaaggcagcggcgcgccgggacaacgcctccggggacgcggccaagggaaaagtaaaggccaagcccccggccgacccagcggcggccgcgtcgccgtgtcgtgcggccgccggcggccagggctcggcggtggctgccgaagccgagcccggcaaggaggagccgccggcccgctcatcgctgttccaggagaaggcgaacctgtaccccccaagcaacacgcccggggatgcgctgagccccggcggcggcctgcggcccaacgggcagacgaagcccctgccggcgctgaagctggcgctcgagtacatcgtgccgtgcatgaacaagcacggcatctgtgtggtggacgacttcctcggcaaggagaccggacagcagatcggcgacgaggtgcgcgccctgcacgacaccgggaagttcacggacgggcagctggtcagccagaagagtgactcgtccaaggacatccgaggcgataagatcacctggatcgagggcaaggagcccggctgcgaaaccattgggctgctcatgagcagcatggacgacctgatacgccactgtaacgggaagctgggcagctacaaaatcaatggccggacgaaagccatggttgcttgttatccgggcaatggaacgggttatgtacgtcatgttgataatccaaatggagatggaagatgtgtgacatgtatatattatcttaataaagactgggatgccaaggtaagtggaggtatacttcgaatttttccagaaggcaaagcccagtttgctgacattgaacccaaatttgatagactgctgtttttctggtctgaccgtcgcaaccctcatgaagtacaaccagcatatgctacaaggtacgcaataactgtttggtattttgatgcagatgagagagcacgagctaaagtaaaatatctaacaggtgaaaaaggtgtgagggttgaactcaataaaccttcagattcggtcggtaaagacgtcttctagagcctttgatccagcaataccccacttcacctacaatattgttaactatttgttaacttgtgaatacgaataaatgggataaagaaaaatagacaaccagttcgcattttaataaggaaacagaaacaactttttgtgttgcatcaaacagaagattttgactgctgtgactttgtactgcatgatcaacttcaaatctgtgattgcttacaggaggaagataagctactaattgaaaatggtttttacatctggatatgaaataagtgccctgtgtagaatttttttcattcttatattttgccagatctgttatctagctgagttcatttcatctctcccttttttatatcaagtttgaatttgggataatttttctatattaggtacaatttatctaaactgaattgagaaaaaattacagtattattcctcaaaataacatcaatctatttttgtaaacctgttcatactattaaattttgccctaaaagacctcttaataatgattgttgccagtgactgatgattaattttattttacttaaaataagaaaaggagcactttaattacaactgaaaaatcagattgttttgtagtccttccttacactaatttgaactgttaaagattgctgc

SEQ ID NO: 61 - DNA, 1106 bp, Homo sapiens
  CDS (217)..(1041)
tttcagccaaacttcgggcggctgaggcggcggccgaggagcggcggactccgggcgcggggagtcgaggcatttgcgcctgggcttcggagcgtagcgccagggcctgagcctttgaagcaggaggaggggaggagagagtggggctcctctatcgggaccccctccccatgtggatctgcccaggcggcggcggcggaggaggcgaccgagaagatgcccgccctgcgccccgctctgctgtgggcgctgctggcgctctggctgtgctgcgcgacccccgcgcatgcattgcagtgtcgagatggctatgaaccctgtgtaaatgaaggaatgtgtgttacctaccacaatggcacaggatactgcaaatgtccagaaggcttcttgggggaatattgtcaacatcgagacccctgtgagaagaaccgctgccagaatggtgggacttgtgtggcccaggccatgctggggaaagccacgtgccgatgtgcctcagggtttacaggagaggactgccagtactcgacatctcatccatgctttgtgtctcgaccttgcctgaatggcggcacatgccatatgctcagccgggatacctatgagtgcacctgtcaagtcgggtttacaggtaaggagtgccaatggaccgatgcctgcctgtctcatccctgtgcaaatggaagtacctgtaccactgtggccaaccagttctcctgcaaatgcctcacaggcttcacagggcagaagtgtgagactgatgtcaatgagtgtgacattccaggacactgccagcatggtggcatctgcctcaacctgcctggttcctaccagtgccagtgccttcagggcttcacaggccagtactgtgacagcctgtatgtgccctgtgcaccctcgccttgtgtcaatggaggcacctgtcggcagactggtgacttcacttttgagtgcaactgccttccagaaacagtgagaagaggaacagagctctgggaaagagacagggaagtctggaatggaaaagaacacgatgagaattagacactggaaaatatgtatgtgtggttaataaagtgctttaaactgaattgaaaaaaaaaaaa

SEQ ID NO: 62 - DNA, 1048 bp, Homo sapiens
  CDS (433)..(924)
ggagccccacccgctcctactccagtcctctcacgcccactgacttaccctgcgcacgcgcgctgaggctccgtggggccgccgcgggccccgccccgaggtgggagggcctgacgcatccacagctggccaatcggcggatggcctcgcgcgcccgccccctccccctgcccccggcgccgggctccacgtgccagtgtttgtgtacgtgcggccgtggcggggctggacagggtccgggtcgttgaggattaggctgctcgggcgtaaccggagctggggcgcggctgccaagggccggcccggaagtcccagcggtctttaaattctcccgtgctagggccagcctgcgcattcttacctgtcggggtgcggcgagtgtctcacctctctgcacttccaaggactcttgtcatctgccttaggcgggaaatgctgttgctggattgcaaccccgaggtggatggtctgaagcatttgctggagacaggggcctcggtcaacgcacccccggatccctgcaagcagtcgcctgtccacttagccgcaggaagcggccttgcttgctttcttctctggcagctgcaaacgggcgctgacctcaaccagcaggatgttttaggagaagctccactacacaaggcagcaaaagttggaagcctggagtgcctaagcctgcttgtagccagtgatgcccaaattgatttatgtaataagaacgggcaaacagctgaagatctcgcttggtcatgtggatttccagactgtgccaagtttcttacaacaattaaatgtatgcagacaataaaagcaagtgaacaccctgacaggaatgattgtgttgccgtgctcagacagaaacggagtctccggaagtgtagaaaataccagtgggaaaaggaagtgctgatgtcacgtgggttatgaagaagtctgaagaacgccttcatttcatgcaaatctataagctcctgcttttggctttaccatatgttgtgtctaaactccttctgaaaaggacgaaaaactttctttccagtgaagatcc

SEQ ID NO: 63 - DNA, 3649 bp, Homo sapiens
  CDS (1)..(3462)
atggggctgctgctcatgatcctggcgtcggccgtgctgggttccttcctcacgctcctcgcccagttcttcctgctgtaccgcagacagcccgagccgccggcggacgaggccgcccgcgcgggcgagggcttccgctacatcaagccagtgccgggcctgctcctaagggagtacctttatggcggcggccgggatgaggagccctccggagcggcccctgagggcggcgcgacccccaccgcggcccccgagacccccgccccgccgacgcgggagacttgctacttcctcaacgccaccatcctattcctgttccgggagttgcgggacaccgcgctgacccgccgctgggtcaccaagaagatcaaggtggagttcgaggagctgctgcagaccaagacggccgggcgcctgctggaggggctgagcctgcgggacgtgttcctgggcgagacggtgcccttcatcaagaccatccggctcgtgcggccagtcgtgccctcggccaccggggagcccgatggccctgaaggggaggcgctgcccgccgcctgccccgaggagctggccttcgaggcggaggtggagtacaacgggggcttccacctggccatcgacgtggacctggtcttcggcaagtccgcctacttgtttgtcaagctgtcccgcgtggtgggaaggctgcgcttggtctttacgcgcgtgcccttcacccactggttcttctccttcgtggaagacccgctgatcgacttcgaggtgcgctcccagtttgaagggcggcccatgccccagctcacctccatcatcgtcaaccagctcaagaagatcatcaagcgcaagcacaccctaccgaattacaagatcaggtttaagccgttttttccataccagaccttgcaaggatttgaagaagatgaagagcatatccatatacaacaatgggcacttactgaaggccgtcttaaagttacgttgttagaatgtagcaggttactcatttttggatcctatgacagagaggcaaatgttcattgcacacttgagttaagcagtagtgtttgggaagaaaaacagaggagttctattaagacggttgaattaataaaaggaaatttacaaagtgttggacttacacttcgtcttgtccagtcaactgatgggtatgctgggcacgtcatcattgaaactgtggctccaaactcgcctgctgcaattgcagatcttcagcggggagatcgacttatcgccattggaggtgtgaaaatcacatcaacactgcaagtgttgaagcttatcaagcaggctggtgaccgagtcctggtgtactatgaaaggcctgttggccagagtaatcaaggtgcagtgctgcaagataactttggccagttggaagaaaactttttgtcaagctcatgccaatcgggttatgaagaggaagctgccgggttgacagtagatactgaaagtagagagctggattctgaatttgaagacttggcaagtgatgtcagagcacaaaatgagttcaaagatgaggcacaatcattaagtcatagtcccaaacgtgttccaacaacactttctattaaaccccttggagctatatcaccagttttaaaccgtaaattagctgtaggaagtcacccactaccaccgaaaattcagtccaaagatggaaataaacctccacccctaaaaacttctgagataacagacccagcacaagtgtcaaaaccaacccaaggatctgctttcaaaccacctgtgccaccacgaccacaagcgaaagttcctttgccttccgccgatgctccaaatcaggcagaaccagatgttctcgttgaaaagccagagaaggtggtgccacctcctcttgtagataaatctgctgaaaagcaagcaaaaaatgtggatgccatagacgatgcagctgcacctaagcaatttttagcaaagcaagaagtggccaaagatgtcacttcagaaacttcctgccctactaaggacagttcggacgaccgtcaaacatgggaatcatcagaaattctttatcgtaataagctaggaaaatggacaagaaccagagcatcctgtttgtttgacatagaagcctgtcacaggtacttaaacattgcattgtggtgcagggatcctttcaagttgggaggtctcatctgtttggggcatgttagtttaaaacttgaagatgtggctttaggatgcctagctacatcaaacacggaatacctttccaaattgagactggaagccccctcacctaaggctatagtcactagaaccgcactacgcaatctgagtatgcaaaagggattcaatgacaaattttgctatggtgacattactattcacttcaaatatttgaaagaaggagaatcagaccaccatgtagttactaacgtagaaaaagaaaaagaaccccatttggttgaagaagtttctgttctccctaaagaggagcaatttgttggacagatgggtttaacagaaaacaaacacagttttcaggatactcagttccagaacccaacatggtgtgactactgtaagaaaaaagtttggactaaagcagcttcccagtgtatgttttgtgcttatgtttgccataaaaaatgtcaagaaaagtgtctagctgagacttctgtttgtggagcaactgataggcgaatagacaggacactgaaaaaccttaggctggaaggacaggaaaccctcttaggcctgcctcctcgtgttgatgctgaagctagcaagtcagtcaataaaacaacaggtttgacaaggcatattatcaatactagttctcgtttattaaatttgcgtcaagtctctaaaactcgcctttctgaaccaggaaccgatctcgtagaaccttcaccaaaacacacacccaacacgtcagacaacgaaggcagtgacacggaggtctgtggtccaaacagtccttctaaacggggaaacagcacaggaataaagttagtgagaaaagagggtggtctggatgacagtgttttcattgcagttaaagaaattggtcgtgatctgtacaggggcttgcctacagaggaaaggatccagaaactagagttcatgttggataagctacagaatgaaattgatcaggagttggaacacaataattcccttgttagagaagaaaaagagacaactgatacaaggaaaaaatcacttctttctgctgccttagctaaatcaggtgaaaggctacaagctctaacacttcttatgattcactacagagcaggcattgaagatatagaaactttagaaagtctgtctttagaccagcactccaaaaaaataagcaagtacacagatgatacagaagaagaccttgataatgaaataagccaactaatagactctcagccattcagcagcatatcagatgacttatttggcccatccgagtctgtgtagcagacaggtctatttaaactttcaaatgaacagggtaaagttgcatctaaagtaccacagatacaaccatgtttaaatcctcgtatgcactctggcctgcttctccagttacttgcttgtgtaagaacaaaaatgagaaaggttgttttccagtaaaaacatgaccagcttactaaaaaaaaaa

SEQ ID NO: 64 - DNA, 1572 bp, Homo sapiens
  CDS (12)..(1187)
gcggggtcgagatggcggcgcctttgaggattcagagcgactgggcgcaagccctcaggaaggatgaaggggaggcctggctgagctgtcatcccccagggaaaccatctttgtatggcagcctgacttgtcaaggaattggcctagatggcatcccagaggttacagcttcagaaggatttactgtgaatgaaataaacaagaaaagcattcatatttcatgtccaaaggaaaatgcatcttctaagtttttggcaccatatactactttttccagaattcatacaaagagtataacatgcctggacatttccagcagaggaggtcttggtgtgtcttctagtactgacgggaccatgaaaatctggcaggcttccaatggagaactcaggagagtattggaaggacatgtgtttgatgtgaattgttgcaggtttttcccatcaggccttgtggtcctgagtgggggaatggatgcccagctgaagatatggtcagctgaagatgctagctgcgtggtgaccttcaaaggtcacaaaggaggtatcctggatacagccatcgttgatcgggggaggaatgtggtgtctgcttctcgagatgggacagcacgactttgggattgtgggcgctcaggctgcttgggagtccttgcagattgtggttcttctatcaatggagtggcggtgggtgctgctgacaactccataaaccttggctcccctgagcagatgcccagtgaacgggaggttggaacagaggccaaaatgctgctcttggcccgggaagataagaaacttcagtgcttgggactacagagcaggcagctggtgttcctctttattggctcagacgctttcaactgctgtacttttctctctggcttcttgctattggctgggactcaagatggaaacatttatcagctggatgtgaggagtccaagggctccggtacaagtcatccacagatcaggagcaccagttctatccctgctaagtgtcagagatggattcattgctagccaaggtgatggaagctgttttattgtccagcaagacttagactatgtcactgagctcactggggctgactgtgaccctgtgtacaaggtagccacatgggagaagcagatctacacatgctgtcgagacggtcttgtacgacgctaccagctttctgacctctgacttcttggaaagagcagtcccggttagtgaaaaggtttgaccctgatcaacaatgagcagaaacatcatcagtccttcccaaggaccatggcgtttaatgtcttgggcaccccttggaaatcacagaaagtcagctgtactggccgtgtggaactctcatcccaagacctactttgaactgagtaagaaggtcattgtgcccactgcatttgttccaacttctccttgtataaactcaccccagcaacacagggcaaggatatagatgcttttagtttgttcttaaaccagttttgttaaatgtttacaaggacctcagtactaaagcctgttctctggaggaaataaagaaaatatgtttggaggtgcctgaaaaaaaaaa

SEQ ID NO: 65 - DNA, 2880 bp, Homo sapiens
  CDS (30)..(2498)
gccgcttccctcgccgccgccccgccagcatgcccggcgtggcccgcctgccgctgctgctcgggctgctgctgctcccgcgtcccggccggccgctggacttggccgactacacctatgacctggcggaggaggacgactcggagcccctcaactacaaagacccctgcaaggcggctgcctttcttggggacattgccctggacgaagaggacctgagggccttccaggtacagcaggctgtggatctcagacggcacacagctcgtaagtcctccatcaaagctgcagttccaggaaacacttctacccccagctgccagagcaccaacgggcagcctcagaggggagcctgtgggagatggagaggtagatcccgtagccggcgggcggcgacgtcccgaccagagcgtgtgtggcccgatggggtcatcccctttgtcattgggggaaacttcactggtagccagagggcagtcttccggcaggccatgaggcactgggagaagcacacctgtgtcaccttcctggagcgcactgacgaggacagctatattgtgttcacctatcgaccttgcgggtgctgctcctacgtgggtcgccgcggcgggggcccccaggccatctccatcggcaagaactgtgacaagttcggcattgtggtccacgagctgggccacgtcgtcggcttctggcacgaacacactcggccagaccgggaccgccacgtttccatcgttcgtgagaacatccagccagggcaggagtataacttcctgaagatggagcctcaggaggtggagtccctgggggagacctatgacttcgacagcatcatgcattacgctcggaacacattctccaggggcatcttcctggataccattgtccccaagtatgaggtgaacggggtgaaacctcccattggccaaaggacacggctcagcaagggggacattgcccaagcccgcaagctttacaagtgcccagcctgtggagagaccctgcaagacagcacaggcaacttctcctcccctgaataccccaatggctactctgctcacatgcactgcgtgtggcgcatctctgtcacacccggggagaagatcatcctgaacttcacgtccctggacctgtaccgcagccgcctgtgctggtacgactatgtggaggtccgagatggcttctggaggaaggcgcccctccgaggccgcttctgcgggtccaaactccctgagcctatcgtctccactgacagccgcctctgggttgaattccgcagcagcagcaattgggttggaaagggcttctttgcagtctacgaagccatctgcgggggtgatgtgaaaaaggactatggccacattcaatcgcccaactacccagacgattaccggcccagcaaagtctgcatctggcggatccaggtgtctgagggcttccacgtgggcctcacattccagtcccttgagattgagcgccacgacagctgtgcctacgactatctggaggtgcgcgacgggcacagtgagagcagcaccctcatcgggcgctactgtggctatgagaagcctgatgacatcaagagcacgtccagccgcctctggctcaagttcgtctctgacgggtccattaacaaagcgggctttgccgtcaactttttcaaagaggtggacgagtgctctcggcccaaccgcgggggctgtgagcagcggtgcctcaacaccctgggcagctacaagtgcagctgtgaccccgggtacgagctggccccagacaagcgccgctgtgaggctgcttgtggcggattcctcaccaagctcaacggctccatcaccagcccgggctggcccaaggagtacccccccaacaagaactgcatctggcagctggtggcccccacccagtaccgcatctccctgcagtttgacttctttgagacagagggcaatgatgtgtgcaagtacgacttcgtggaggtgcgcagtggactcacagctgactccaagctgcatggcaagttctgtggttctgagaagcccgaggtcattacctcccagtacaacaacatgcgcgtggagttcaagtccgacaacaccgtgtccaaaaagggcttcaaggcccacttcttctcagtcttggagggggcaggggaccgacactcacatctatcaggcctggagttactgctctgcccccatgccctggtcgacactgtgcccgccccaccctcagccctgcacggagacacacacgcccacacgcacacacatgtgcacacacattgccccatcgcacaagaaacctgcagaggacccccactgggggcatcgaggctcagccctcagggcccggggcatctgactctggccccccaggaggggagctatttggacttttgggacacccaccgaggagaccctaagccaagaaggagaagaaagagcctgaagaccttcagtctgacccctgccaccttccggggcatttgggcactgtaggaaaagaggccagctctgcagccccctcggggacgcccccaccagctcaaattccgagtgcagaaaagaaaccggaccccccagtgaggcctgccaggcctcccggaccccttgttactcaggaacctcaccttggacggaatgggatgggggcttcggtgcccaccaaccccccacctccactctgccattccggcccacctccctctggccggacagaactggtgctctcttctccccactgtgcccgtccgcggaccggggacccttccccgtgccctaccccctcccattttgatggtgtctgtgacatttcctgttgtgaagtaaaagagggacccctgcgtcctgctcctttctcttgcaaaaaaaaaaaaaa

SEQ ID NO: 66 - DNA, 3606 bp, Homo sapiens
  CDS (1213)..(2349)
cataacaatgaccaggcagtagttgaaatctgtatcacaagaatcacaacagccatcagagagaccgagtccattgaaaagcatgcaaaggcccttgtggggctctgggactcctgcttggaacataacctgagaccctttgggaaagacgaagacactcctcatgcaaaaatcgcatctgatatcatgagttgcattttacagaattacaaccgacccccagtgatggcattagccatccccattgcagtgaaattcctccacagaggcaacaaggaactgtgcaggaatatgtctaactacctgtctctggctgcaattaccaaggcagatctcctggctgatcacacggaagttatagtaaagagcatactccaaggtaacaccatgttgttgagagtgttacctgctgtgtatgaaaagcagcctcagccaattaatagacacctgacagaactcctggccttgatgtctcagctggaacagccagaacagtaccatctactacggcttttgcatgtagcagcaaagaaaaaacaactcgaggtagttcagaagtgtattcctttcctaattgggcatttgaaggattcaacccataatgacatcatcctaaacatcctcatagagatagcagtctatgagccagtggctttgaacagttttcttccaatgctgaaagagattggtgagagattcccctacctcactggacagatggcaaggatttatggagctgttgggcatgtggatgaagagagagccaggagctgcctgacatacctggtgagccaactggccaacatggagcattcgtttcaccatattctcctgctggagattaaaagcatcaccgacaccttctcctcaatcttgggccctcagagcagagacatcttccgcatgagcaacagcttcaccgccattgctaaactccttacccgacaactggaaaataccaaggctggaagtggcaggagaaaaatcagcactgaaattgaattccctgagaaactggaagaaaccaagctcatagtaactgaaaatgaagaccatgaaaaactccaagttaaaatccaggcttttgaagacaagataaatgcagggagcaatacccctggctctatcagaagatatagtctgggccaagtttctaaaaaaaaaaaaaaaaacattagatttaacaggtcaaaaagtttggctttccacactatgctcacaaagggtgtgggttcagatgacggcgaagatgaaaacaggggagacataccagccagcatctctctttcagaaatagacccacttggccaaggaaatgacaagctgccgtttaagacagacactgagagatcacagctgggggagtcttcagtttcatacccaaatattatacatatagactcagagaatttgtcagaaactgttaaagaaaactcccaggaagaaactccagagacaactgcaagtcctatagaataccaagataagctctacttgcacttaaaaaaaaacctcagcaaagtgaaagcatatgccatggaaattggaaagaagattccagtccctgatcagtgtaccattgaagacactgtgagaagttgtgtagcaaagttgttcttcacctgctccctgaagggtcattactgcctatacagtaagtccagttttattctcatcagccaagaacctcagccatggatccagatcatgtttctatttcagcagagcctgtttcctgaacccctgtccattcagagtcattctgtgcaattcctcagagctctgtgggagaagacccaggcagggggtgctcacagctttgaaactgccatgatggagtccacgtttccacagcagaaggatctggaccaggtacagctccatctggaagaagtgaggttctttgacgtgtttggcttcagtgaaacagcaggagcatggcaatgcttcatgtgcaacaatcctgagaaagcaactgttgtaaatcaagatggccagcctctcatagaaggaaaacttaaagagaagcaagtcagatggaagttcatcaaaaggtggaaaacacgctattttacactggctggaaatcaacttctgtttcaaaaaggaaagtctaaagatgaccctgacgactgcccaatagaactcagcaaagtacagagtgtgaaggctgtggccaagaaacgcagggaccgctctctcccccgggctttcgaaatcttcacagacaataaaacctatgtctttaaggccaaggatgagaagaatgcagaagaatggctccagtgcatcaacgtggcagttgcccaagccaaagaaagggaaagtagagaagtaaccacatatctgtagggatttataagtcagccatgacaattatacaccacaggcattgtattatcattgccaatgtcaagaaaaagagctaaatttaccaagccatgttgttttttactaaataccaatggaattgttgtcctttaagaagaagggcctaaaatggcaggattcttagtaaatgtcatactctaacagctttagtattgacttcagaatatatctgatgcccacaaaaataaaataaaataaaaggagctacagagtatgccctcagatagtgtggggccaggaagggaaaagtcactgataaaagaacttctgtagatatgtcatttaaaactgtgagaaaacaacatgaaaagatgcctgaactctccatcctgaggaaagattagcacttctgatgaaaatcacagtctgtcaaaggtattaaaagaaaactttaaaaaaaaaaacctttagaaacgttgaactaatgtacactgagaaaaaccatataacttacttatagacatataattacatgatcctctcttactacaactgaggctaacacatggtaaaatggttcccaaatcaagccagttatgtcattaaatacttgtctttcagaattacttatttaattattccatttaagttcatataatataatctacagtttagatacttggacatatatcctgcccaaggcactaagtgtaatataggaaaaggatagaaagccattttctctatcttcaaaataatgtgccatctccattaaaattaagactttaaagttctataattttttctttgtattcaactttttaatacctccaaattacaaacatctatttttttcactacatagatatataattacactatgatagacagaattctagagtgattctcaataatccatgccttggtataatcctctcccccattgagtgtgggtgggacatgtaacctgcttctaaccaacagaatatggcaaaagtgatgggatcatctctcccatattatgttatgttatataacaaaagtgaagagaagttgcagatatacataaggtttctaatcagctgactttgagttaatcaaagagatcccctgggtgggcctgacctaatcagactagtcctttaaaagagagtgaaccagtcagagactctctctcctattagccttaaataagcaagctgccatgagctctacggctgcaaggaaataagttttgtgaacaaccatgtgatcttggaagaagcatctgaacct

SEQ ID NO: 67 - DNA, 1809 bp, Homo sapiens
  CDS (178)..(1344)
ggtgacagggacacaacatggcggcgggatctctaacgctctccttcgagggaccaccacggagatcctagtgcgggaccccgcctcagggaagtggaaagcagggggacaaccttcctgcttctttcttttccgtccagtgtcggcaaggggttgtcaccggcttccgcatccaagatgaagaactataaagcaattggcaaaataggagagggaacgttttctgaagttatgaagatgcaaagcctgagagatggaaactactatgcatgtaaacaaatgaagcagcgctttgaaagtgacagaaaatctggttctcttgcactaatatgtgaacttatggacatgaatatttatgagctaatacgagggagaagatacccattatcagaaaaaaaaattatgcactatatgtaccagttatgtaagtccctggatcatattcacagaaatggaatatttcacagagatgtaaaaccagaaaatatactaataaagcaggatgtcctgaaattaggggactttggctcctgccggagtgtctattccaagcagccgtacacggaatacatctccacccgctggtaccgggccccggagtgtctcctcactgatgggttctacacgtacaagatggacctgtggagcgccggctgtgtgttctacgagatcgccagtctgcagcccctctttcctggagtaaatgaactggaccaaatctcaaaaatccacgatgtcatcggcacacccgctcagaagatcctcaccaagttcaaacagtcgagagctatgaattttgattttccttttaaaaagggatcaggaatacctctactaacaaccaatttgtccccacaatgcctctccctcctgcacgcaatggtggcctatgatcccgatgagagaatcgccgcccaccaggccctgcagcacccctacttccaagaacagaggaaaacagagaagcgggctctgggcagccacagaaaagctggctttccggagcaccctgtggcaccggaaccactcagtaacagctgccagatttccaaggagggcagaaagcagaaacagtccctaaagcaagaggaggaccgtcccaagagacgaggaccggcctatgtcatggaactgcccaaactaaagctttcgggagtggtcagactgtcgtcttactccagccccacgctgcagtccgtgcttggatctggaacaaatggaagagtgccggtgctgagacccttgaagtgcatccctgcgagcaagaagacagatccgcagaaggaccttaagcctgccccgcagcagtgtcgcctgcccaccatagtgcggaaaggcggaagataactgagcagcaccgtcgtctcgacttcggaggcaacaccaagcccgaccgggccaggcctgggtgatctgctgctgagacgccacggagggctggggatgcgcctgcgtccgtttcgcgctggccggggctctgggtgctgccctgcgccctgccgcacccgcggcccgcgcagctgcctaggatgttctgggctaatatacttgtaaaaccaccgcattctagggttttctttcattttcgttaagaatttggggcaggaaatactttgtaactttgtatatgaatcaaaacaaacgagcaggcatttctgtgatgtgttgggcgtggttggaaggtgggttctgcgtgtcccttcccagcgctgctggtcagtcgtggagcgccatcatgtcttaccagtgacgctgctgacacccctgacttttattaaagaataagctgtcgttaaaaaaaaaaaaaaa

SEQ ID NO: 68 - DNA, 2717 bp, Homo sapiens
  CDS (1)..(2673)
atggaccagccagaggccccctgctccagcacggggccgcgcctcgcggtggcccgcgagctgctcctggctgcgctggaggaactgagccaagagcagctgaagcgcttccgccacaagctgcgcgacgtgggcccggacggacgcagcatcccgtgggggcggctggagcgcgcggacgccgtggacctcgcggagcagctggcccagttctacggcccggagcctgccctggaggtggcccgcaagaccctcaagagggcggacgcgcgcgacgtggcggcgcagctccaggagcggcggctgcagcggctcgggctcggctccgggacgctgctctccgtgtccgagtacaagaagaagtaccgggagcacgtgctgcagctgcacgctcgggtgaaggagaggaacgcccgctccgtgaagatcaccaagcgcttcaccaagctgctcatcgcgcccgagagcgccgccccggaggaggcgctggggcccgcggaagagcctgagccggggcgcgcgcggcgctcggacacgcacactttcaaccgcctcttccgccgcgacgaggagggccggcggccgctgaccgtggtgctgcagggcccggcgggcatcggcaagaccatggcggccaaaaagatcctgtacgactgggcggcgggcaagctgtaccagggccaggtggacttcgccttcttcatgccctgcggcgagctgctggagaggccgggcacgcgcagcctggctgacctgatcctggaccagtgccccgaccgcggcgcgccggtgccgcagatgctggcccagccgcagcggctgctcttcatcctggacggcgcggacgagctgccggcgctggggggccccgaggccgcgccctgcacagaccccttcgaggcggcgagcggcgcgcgggtgctaggcgggctgctgagcaaggcgctgctgcccacggccctcctgctggtgaccacgcgcgccgccgcccccgggaggctgcagggccgcctgtgttccccgcagtgcgccgaggtgcgcggcttctccgacaaggacaagaagaagtatttctacaagttcttccgggatgagaggagggccgagcgcgcctaccgcttcgtgaaggagaacgagacgctgttcgcgctgtgcttcgtgcccttcgtgtgctggatcgtgtgcaccgtgctgcgccagcagctggagctcggtcgggacctgtcgcgcacgtccaagaccaccacgtcagtgtacctgcttttcatcaccagcgttctgagctcggctccggtagccgacgggccccggttgcagggcgacctgcgcaatctgtgccgcctggcccgcgagggcgtcctcggacgcagggcgcagtttgccgagaaggaactggagcaactggagcttcgtggctccaaagtgcagacgctgtttctcagcaaaaaggagctgccgggcgtgctggagacagaggtcacctaccagttcatcgaccagagcttccaggagttcctcgcggcactgtcctacctgctggaggacggcggggtgcccaggaccgcggctggcggcgttgggacactcctgcgtggggacgcccagccgcacagccacttggtgctcaccacgcgcttcctcttcggactgctgagcgcggagcggatgcgcgacatcgagcgccacttcggctgcatggtttcagagcgtgtgaagcaggaggccctgcggtgggtgcagggacagggacagggctgccccggagtggcaccagaggtgaccgagggggccaaagggctcgaggacaccgaagagccagaggaggaggaggagggagaggagcccaactacccactggagttgctgtactgcctgtacgagacgcaggaggacgcgtttgtgcgccaagccctgtgccggttcccggagctggcgctgcagcgagtgcgcttctgccgcatggacgtggctgttctgagctactgcgtgaggtgctgccctgctggacaggcactgcggctgatcagctgcagattggttgctgcgcaggagaagaagaagaagagcctggggaagcggctccaggccagcctgggtggcggcagttctcaaggcaccacaaaacaactgccagcctcccttcttcatccactctttcaggcaatgactgacccactgtgccatctgagcagcctcacgctgtcccactgcaaactccctgacgcggtctgccgagacctttctgaggccctgagggcagcccccgcactgacggagctgggcctcctccacaacaggctcagtgaggcgggactgcgtatgctgagtgagggcctagcctggccgcagtgcagggtgcagacggtcagggtacagctgcctgacccccagcgagggctccagtacctggtgggtatgcttcggcagagccccgccctgaccaccctggatctcagtggctgccaactgcccgcccccatggtgacctacctgtgtgcagtcctgcagcaccagggatgcggcctgcagaccctcagtctggcctctgtggagctgagcgagcagtcactacaggagcttcaggctgtgaagagagcaaagccggatctggtcatcgcacacccagcgctggacggccacccacaacctcccaaggaactcatctcgaccttctgaggctctggtggccagagcagggtggaagaccctagtcaaag

SEQ ID NO: 69 - DNA, 2871 bp, Homo sapiens
  CDS (150)..(1136)
cctgttacgaccccgcgtccggctctgtgtcaggtcgtcgttacccaccgagtgttctgctgcaaggcttgccgagaagggagcaaccctggcttgctgagacgtggttgattcattctgcagtgacgtcttttgagccgtcctcaggaatgtgttgtatctactgtggagcagcctgtggtggttacttccttatctcccctaagcagcatgagagatgggaactgggtcagaggcacttgcagctgggagcaggtaagttcgaggatcgggaagaccacgtccccaagttggagcaaataaacagcacgaggatcctgagcagccagaacttcaccctcaccaagaaggagctgctgagcacagagctgctgctcctggaggccttcagctggaacctctgcctgcccacgcctgcccacttcctggactactacctcttggcctccgtcagccagaaggaccaccactgccacacctggcccaccacctgcccccgcaagaccaaagagtgcctcaaggagtatgcccattacttcctagaggtcaccctgcaagatcacatattctacaaattccagccttctgtggtcgctgcggcctgtgttggggcctccaggatttgcctgcagctttctccctactggaccagagacctgcagaggatctcaagctattccctggagcacctcagcacgtgtattgaaatcctgctggtagtgtatgacaacgtcctcaaggatgccgtagccgtcaagagccaggccttggcaatggtgcccggcacaccccccacccccactcaagtgctgttccagccaccagcctacccggccctcggccagccagcgaccaccctggcacagttccagacccccgtgcaggacctatgcttggcctatcgggactccttgcaggcccaccgttcagggagcctgctctcggggagtacaggctcatccctccacaccccgtaccaaccgctgcagcccttggatatgtgtcccgtgcccgtccctgcatcccttagcatgcatatggccattgcagctgagcccaggcactgcctcgccaccacctatggaagcagctacttcagtgggagccacatgttccccaccggctgctttgacagataggccacctccagacctcacgaggaagccttggagatgtgggcagaaggaagaagacactgaagaggagagctcagccaagtgaggcagcaggaggccatccctgaagagccttggaacgtgggaaggtctgtgctccttttaaaataaaactgacccagagcaaaacattcaataacatacctcacccgagagcattcctctgagaaacgtctgccacgtgtggctagggtacaaaaggatggcttggtggccgtccccccacacaggggcccagtgaatcgagaaagacttgataagaggccaggagagtgggaactggacacagaccactgatctcaagcgtgtccagtttttagcattaaagacttttctattctttgctgatggcagctacaccgctgaaaaaggaggggcagcctggcgtgttctcaggacccccggaggatcccatattgggtgcttttctttccctggctctatgcagaggggcctgagttggtgtgtatgcctgagtgtttgccttgcgaggcacagtgggtggctgtcttgcctttgttttcgaaccaaaaaccattttcagccttttagatatgtcatgtgctgctgcttcccgaagtggtcttgctttctgtttcgtaagatgtcttgtttacacactgtatcagggatttggtgatacttgaaaattcctttggagaaaaaaacaaatttaattgccacactgcctgtcccacatgagggctgttaatttagaacccaagtttgaacccaacttgtgatggacccgcaggtaaccacagagcttcctttttgaaggcatatggttggagagaaccattttcccagctctcggttccggaagattccacgtcttggaggctgtgttcaccactagaactttaataactacccagggagggagaagctcgttgaaaggaagacaaagatttaaacagttcccacctctctccaccacatacttacagggcatgagtttaacccagtctaggctttgagtgtggctgatagcgaaggatagcaatgtggaaaatttgcttagtcccacctgtatttggggagtgggatgtacatgggcgtttgataccaccattgataggcaagcgactggttggatcaaaagccagtatttagggatctgcagcgagagggccctcaggaagactctcgtaaccatgtgcaatatgtttttattctgactcgcagcttgtgctcagcatgttctttggtttagtttggggttgggggacacattgttcacccagcagaactgggaggtgcaaaggaccgtggaagcaatttttgttttgtttgaggaatacctgtcttggattccttagccccttgccagtcctggagactgtggcaggggccgccaggaaggcagctgtctgctgctgagtcagatcggaaggtggtgaatctttccagagcagctgaaaatctcagcatggagacagtaagaaaagagacggggtgtggataagactctgccaccgtgtcacactagcataggaggctgcacgttcatttgttgttgtttttttttcctttgccaacctccgttctatttatgtgcaagcagtttggattcaagttcttgtatctgtctgttctgggacctggggattgtgagggttccctcacagccagcacgacccccagaaagaggcgtcccacaataaacacgtcacctgctaaaaaaaaaaaaaaa

SEQ ID NO: 70 - DNA, 2898 bp, Homo sapiens
  CDS (476)..(2518)
caggaaaaagaaatcccagtgtaaaggctagttggcaattcattggtccggggatctggcaaaaacaacccaatatctgtatgtctctatacatgggtgtgtatgataatatcttgattttccttggtagagattttacacaggatataataagtgacacaacggtttgggcagatggggtcagaatatgaaggcaattccttccatgtaagaatttgggtgctggtttaaatttaatagactcgcttctcctaaccacactctggaagtctcctgtcattcatgcacataagaactcagaagagaacctctactgtctccccaaaatcttgtttttttcttttaataaactggctgacatgggccaggtttcaagagcatggtaagttcatgatccatcagcctggtttcggaatggaaatccaatgagtcatgggtatggtgtggtcctaccttttccaggcaccttctaaaaatgaacaagagcagctctgatttggaaaaagtgagccagggctctgcagaaagcctcagcccatccttcaggggtgtccacgtcagcttcaccaccggctccacggacagcctggcctcagactctaggacctgcagcgatggaggtccctcgtctgagctggctcactcgcccaccaacagcgggaagaagctctttgctcccgttccgtttccttcaggctccactgaggacgtgtcccccagtggcccccagcagccccctccactcccccagaaaaagatagtgagccgggcagcctcttcaccggatggcttcttctggacccaaggctcccccaagcccggaacagcaagccccaagctgaacctaagccactcggaaaccaacgtccacgacgaatctcactttagctattcgttgagccccgggaaccgccaccatcctgtcttctcctcttccgatcctctggagaaagctttcaaaggcagtggccactggcttccggcagcagggctggcgggcaacagaggcggctgcgggagccctggcctccagtgcaaaggggccccctccgcctcatcctcccagctgagcgtgtccagtcaagcctccaccgggagcacccagcttcagctgcacggtctcctgagcaacatcagcagcaaggagggcacctatgccaagctggggggactctacacccagtccctggcccgccttgtagccaaatgtgaggacctcttcatgggcggccagaaaaaggagctccacttcaatgagaataactggtcgctcttcaagctgacttgtaacaagccctgctgtgactcgggggatgccatttattactgtgccacctgctctgaggaccccggcagcacctatgctgtgaaaatctgcaaagcccctgagcccaaaacagtctcctactgcagcccgtccgtgcccgtgcactttaacatccagcaggactgcggccacttcgtcgcctcggtgccgtccagcatgctcagctcccccgacgcgcccaaggaccctgtgcctgccctgcccacacacccccctgcccaggagcaggactgcgtggtggtcatcacccgagaggtgccacatcagaccgcctccgacttcgtgcgggactcggcggccagccaccaggcggagcccgaggcgtacgagcggcgcgtgtgcttcctgcttctgcaactctgcaacgggctggagcacctgaaggagcacgggatcatccaccgggacctgtgcctggagaacctgctgctggtgcactgcaccctccaggccggccccgggcccgcccccgcccccgccccggctcccgcccccgccgccgccgcgcctccctgctcctctgccgccccgcctgctggtggcactctcagccccgcagccggccccgcctccccggaagggccccgggagaagcagctgccccggctcatcatcagcaactttttgaaggccaagcagaagccgggcagcaccccaaacctgcagcagaagaagagccaggcccggctggcccccgagatcgtgtctgcttcccagtaccgcaagttcgatgagttccagacaggcatcctcatctacgagctgctgcaccaacccaacccgttcgaggtgcgcgcccagctgcgggagagagactaccggcaggaggacctgccgccgctgcccgcgctgtccctctactcacccggcctgcagcagctggcacatctgctactggaggccgaccccatcaagcgtatccgcatcggcgaggccaagcgcgtgctgcagtgcctgctgtgggggcctcggcgcgagctggtgcagcagccgggcacctcggaggaggcgctgtgcggcacgctgcacaactggatcgacatgaagcgggccctgatgatgatgaagtttgcggagaaggcggtggatcgcaggcggggcgtggagctggaggactggctttgctgccagtacctggcgtctgcggagcccggggccctcttacagtcgctgaagctcctgcagcttctgtgagccaagccccagcctgcaccgtcgctgccccttccctgcctaaccctttcctgtctcgccttggaagcacccatgtctccctgggaaatggtacagatgactgggatacctggatgtaaaatatataaatatatatatagaaaatacatataccatatataaatatgaaagactaaggatgctgttgcccgtccacactcgtctcctctctgcactaagtcctccctgttttcttctgtaattatacacatttccagttccatgcaacgtcctgaggacagttctgtgaactgaatgcagcctggacactggcctcaataccttgtttaggatttcttcacccttttgtcaaattgttatttaaagaaaaaaaaaaa

SEQ ID NO: 71 - DNA, 4686 bp, Homo sapiens
  CDS (137)..(4411)
cgggcggcgtgcggctgctctgggtgtcgctattggtgctgctggcgcagctaggggccgcagcctggactgggccggctcggagagcgtctccgcgtgcgcttcaccccggtcgtgtgcggcctgcgctgcgtccatgggccgaccggctcccgctgtaccccgacctgcgcgccccgcaacgccaccagcgtggacagcggcgctcccggcggggcggccccggggggacccgggcttccgcgccttcctgtgtcccttgatctgtcacaatggcggtgtgtgcgtgaagcctgaccgctgcctctgtcccccggacttcgctggcaagttctgccagttgcactcctcgggcgcccggcccccggccccggctataccaggcctcacccgctccgtgtacactatgccactggccaaccaccgcgacgacgagcacggcgtggcatctatggtgagcgtccacgtggagcacccgcaggaggcgtcggtggtggtgcaccaggtggagcgtgtgtctggcccttgggaggaggcggacgctgaggcggtggcgcgggcggaagcggcggcgcgggcggaggcggcagcgccctacacggtgttggcacagagcgcgccgcgggaggacggctactcagatgcctcgggcttcggttactgctttcgggagctgcgcggaggcgaatgcgcgtccccgctgcccgggctccggacgcaggaggtctgctgccgaggggccggcttggcctggggcgttcacgactgtcagctgtgctccgagcgcctggggaactccgaaagagtgagcgccccagatggaccttgtccaaccggctttgaaagagttaatgggtcctgcgaagatgtggatgagtgcgcgactggcgggcgctgccagcacggcgagtgtgcaaacacgcgcggcgggtacacgtgtgtgtgccccgacggctttctgctcgactcgtcccgcagcagctgcatctcccaacacgtgatctcagaggccaaagggccctgcttccgcgtgctccgcgacggcggctgttcgctgcccattctgcggaacatcactaaacagatctgctgctgcagccgcgtaggcaaggcctggggccggggctgccagctctgcccacccttcggctcagagggtttccgggagatctgcccggctggtcctggttaccactactcggcctccgacctccgctacaacaccagacccctgggccaggagccaccccgagtgtcactcagccagcctcgtaccctgccagccacctctcggccatctgcaggctttctgcccacccatcgcctggagccccggcctgaaccccggcccgatccccggcccggccctgagtttcccttgcccagcatccctgcctggactggtcctgagattcctgaatcaggtccttcctccggcatgtgtcagcgcaacccccaggtctgcggcccaggacgctgcatttcccggcccagcggctacacctgcgcttgcgactctggcttccggctcagcccccagggcacccgatgcattgatgtggacgaatgtcgccgcgtgcccccgccctgtgctcccgggcgctgcgagaactcaccaggcagcttccgctgcgtgtgcggcccgggcttccgagccggcccacgggctgcggaatgcctggatgtggacgagtgccaccgcgtgccgccgccgtgtgacctcgggcgctgcgagaacacgccaggcagcttcctgtgcgtgtgccccgccgggtaccaggctgcaccgcacggagccagctgccaggatgtggatgaatgcacccagagcccaggcctgtgtggccgaggggcctgcaagaacctgcctggctctttccgctgtgtttgcccggctggcttccggggctcggcgtgtgaagaggatgtggatgagtgtgcccaggagccgccgccctgtgggcccggccgctgtgacaacacggcaggctcctttcactgtgcctgccctgctggcttccgctcccgagggcccggggccccctgccaagatgtggatgagtgtgcccgaagccccccaccctgcacctacggccggtgtgagaacacagaaggcagcttccagtgtgtctgccccatgggcttccaacccaacgctgctggctccgagtgcgaggatgtggatgagtgtgagaaccacctcgcatgccctgggcaggagtgtgtgaactcgcccggctccttccagtgcagggcctgtccttctggccaccacctgcaccgtggcagatgcactgatgtggacgaatgcagttcgggtgcccctccctgtggtccccacggccactgcactaacaccgaaggctccttccgctgcagctgcgcgccaggctaccgggcgccgtcgggtcggcccgggccctgcgcagacgtgaacgagtgcctggagggcgatttctgcttccctcacggcgagtgcctcaacactgacggctcctttgcctgtacttgtgcccctggctaccgacccggaccccgcggagcctcttgcctcgacgttgacgagtgcagcgaggaggacctttgccagagcggcatctgtaccaacaccgacggctccttcgagtgcatctgtcctccgggacaccgcgctggcccggacctcgcctcctgcctcgacgtggacgaatgtcgcgagcgaggcccagccctgtgcgggtcgcagcgctgtgagaactctcccggctcctaccgctgtgtccgggactgcgatcctgggtaccacgcgggccccgagggcacctgtgacgatgtgaacgagtgtgaaacactacagggtgtatgtggagctgccctgtgtgaaaatgtcgaaggctccttcctctgtgtctgccccaacagcccggaagagtttgaccccatgactggacgctgtgttcccccacgaacttctgctggcatgttcccaggctcgcagccccaggcacctgctagccccgttctgcccgccaggccacctccgccacccctgccccgccgacccagcacacctaggcagggccctgtggggagtgggcgccgggagtgctactttgacacagcggccccggatgcatgtgacaacatcctggctcggaatgtgacatggcaggagtgctgctgtactgtgggtgagggctggggcagcggctgccgcatccagcagtgcccgggcaccgagacagctgagtaccagtcattgtgccctcacggccggggctacctggcgcccagtggagacctgagcctccggagagacgtggacgaatgtcagctcttccgagaccaggtgtgcaagagtggcgtgtgtgtgaacacggccccgggctactcatgctattgcagcaacggctactactaccacacacagcggctggagtgcatcgataatgacgagtgcgccgatgaggaaccggcctgtgagggcggccgctgtgtcaacactgtgggctcttatcactgtacctgcgagcccccactggtgctggatggctcgcagcgccgctgcgtctccaacgagagccagagcctcgatgacaatctgggagtgtgctggcaggaagtgggggctgacctcgtgtgcagccaccctcggctggaccgtcaggccacctacacagagtgctgctgcctgtatggagaggcctggggcatggactgcgccctctgccctgcgcaggactcagatgacttcgaggccctgtgcaatgtgctacgcccccccgcatatagccccccgcgaccaggtggctttggactcccctacgagtacggcccagacttaggtccaccttaccagggcctcccatatgggcctgagttgtacccaccacctgcgctaccctacgacccctacccaccgccacctgggcccttcgcccgccgggaggctccttatggggcaccccgcttcgacatgccagactttgaggacgatggtggcccctatggcgaatctgaggctcctgcgccacctggcccgggcacccgctggccctatcggtcccgggacacccgccgctccttcccagagcccgaggagcctcctgaaggtggaagctatgctggttccctggctgagccctacgaggagctggaggcggaggagtgcgggatcctggacggctgcaccaacggccgctgcgtgcgcgtccccgaaggcttcacctgccgttgcttcgacggctaccgcctggacatgacccgcatggcctgcgttgacatcaacgagtgtgatgaggccgaggctgcctccccgctgtgcgtcaacgcgcgttgcctcaacacggatggctccttccgctgcatctgccgcccgggattcgcacccacgcaccagccacaccactgtgcgcccgcacgaccccgggcctgagccctggcacccgatggccacccacccgcgcccgccactcggggcccctgccccgcatcctgcagcccgcttagtctgatgacgaggaagcccgccagaaagtccagaagaaggaacgacggacgcaaagcggcgccgcctaccatgcctcccccccccaccaccaccccccccaactgtggtcgtccccgcccggcccaccccgcccccatttctccccccttctttcaataaaaatttcaatcataaaaaaccacctataaaaaaaaaaa

SEQ ID NO: 72 - DNA, 1167 bp, Homo sapiens
  CDS (144)..(1085)
agtttgcaagagttcaagcccttagatctgcttttgaaggagaagaggctatttgtaagaaagctggtaagtttctattccaaggttcatgatctaataggaagactgcaggtgtggccgtcaggcccaagtcctaggtgagaatgcaggtctgcgagcccctaggaccggaccataacgaccttaacagccctaacggccgtaactgccataacggccggctgcgcgaggcccttccagcatttccactttcgtcaggtactggagagggctgccggccggatgccagggcagaggggcagggcggacggctaggagttcaagaaacatcctggtctgagggaaaggctgcagcctgcaccgccatgaataagcttttcagcttctggaagaggaagaatgagacccgcagccagggctacaaccttcgagaaaaggatttaaagaaacttcacagagctgcttcagtcggggatttgaagaagctgaaggaataccttcagatcaagaaatatgatgtaaatatgcaggacaaaaaatacagaacacctttgcacctagcctgtgctaatggacatacagatgttgtacttttcctaattgagcaacaatgcaaaataaatgtccgggatagtgaaaacaaatccccattgattaaggcagtacagtgtcaaaatgaggattgtgctactattcttctaaactttggtgcagacccagatctgagggatattcgttataatactgttcttcactatgctgtttgtggtcaaagtttgtcattagttgaaaaactgcttgaatacgaagctgatcttgaagcgaaaaataaggatgggtatactccactattagttgccgttattaacaataatccaaaaatggtaaaatttcttctggagaaaggggctgatgtgaatgcttcagataattatcaaagaacagcccttattcttgctgtcagtggtgaaccaccatgtttacgctacaagcttcttcttcagcaaggtgtggaattatgttacgcacggtatcgtggattcacagctgacggaaatatgcttcatctccacggtttcactgcatagatacccacaattcactgcgagccatggcaacgcacgacacatgctacatagacaccttattctggcactacatgtgact

SEQ ID NO: 73 - DNA, 2740 bp, Homo sapiens
  CDS (924)..(2507)
ggggcgcgaggtactggcacacggatgaggagtcgtagaagaggggcctgcagattgtgctctcagcaagcctgtcgtctagtggaagacactggccgggacacagagcccacgtgtggacaccgctgtgggttggtggcaggggtcgagcaggtgccatcaggcacatgaacggtggagtcttcaaaggtgtgagcagctgctggaagaggaggtgctcctgaagacactgcggccggcccgcctgtgcccttggtgccctggctgcctagagagcctcacccctgggccctggggccaggactccaggactctgactacctgccctcccccagcctcagcggctgcacctcctcgttagtactgatgcactgacctcggcacacagctgggaggggttgggggctgggtcatggctgctcccaggccccacccaggctcctgagcctagaaggtgaaaagaggactctcaggggctcacaggggctctcactgctggttggccctgccctcccttccccctcagcagggtgcccggaagctggaaccttgttatctgggtaattagtttcagaccctgcactgaggccggccaggtctcggggctgcctcccataggttgtgcaccctgaccccgagagggaggcgaggcgctgcttgtcgacagctagaggctggcctggggagcaggtttggggtgccctcccacactgccctccctgccccggcccatgccccccagggctgcctgggcctggttattgtgtggggcctcctgacccagccaagggcacgaagctctgggaaggggatgcccccgagggtgccagtccagctagctgccccacccctcaggcccagcctggcccccaagctccccactctggtgccccgagcagccctgtgggcaagcagccgccgccatggccgagcacctggagctgctggcagagatgcccatggtgggcaggatgagcacacaggagcggctgaagcatgcccagaagcggcgcgcccagcaggtgaagatgtgggcccaggctgagaaggaggcccagggcaagaagggtcctggggagcgtccccggaaggaggcagccagccaagggctcctgaagcaggtcctcttccctcccagtgttgtccttctggaggccgctgcccgaaatgacctggaagaagtccgccagttccttgggagtggggtcagccctgacttggccaacgaggacggcctgacggccctgcaccagtgctgcattgatgatttccgagagatggtgcagcagctcctggaggctggggccaacatcaatgcctgtgacagtgagtgctggacgcctctgcatgctgcggccacctgcggccacctgcacctggtggagctgctcatcgccagtggcgccaatctcctggcggtcaacaccgacgggaacatgccctatgacctgtgtgatgatgagcagacgctggactgcctggagactgccatggccgaccgtggcatcacccaggacagcatcgaggccgcccgggccgtgccagaactgcgcatgctggacgacatccggagccggctgcaggccggggcagacctccatgcccccctggaccacggggccacgctgctgcacgtcgcagccgccaacgggttcagcgaggcggctgccctgctgctggaacaccgagccagcctgagcgctaaggaccaagacggctgggagccgctgcacgccgcggcctactggggccaggtgcccctggtggagctgctcgtggcgcacggggccgacctgaacgcaaagtccctgatggacgagacgccccttgatgtgtgcggggacgaggaggtgcgggccaagctgctggagctgaagcacaagcacgacgccctcctgcgcgcccagagccgccagcgctccttgctgcgccgccgcacctccagcgccggcagccgcgggaaggtggtgaggcgggtgagcctaacccagcgcaccgacctgtaccgcaagcagcacgcccaggaggccatcgtgtggcaacagccgccgcccaccagcccggagccgcccgaggacaacgatgaccgccagacaggcgcagagctcaggccgccgcccccggaggaggacaaccccgaagtggtcaggccgcacaatggccgagtagggggctccccagtgcggcatctatactccaagcgactagaccggagtgtctcctaccagctgagccccctggacagcaccaccccccacaccctggtccacgacaaggcccaccacaccctggctgacctgaagcgccagcgagctgctgccaagctgcagcgacccccacctgaggggcccgagagccctgagacagctgagcctggcctgcctggtgacacggtgaccccccagcctgactgtggcttcagggcaggcggggacccacccctgctcaagctcacagccccggcggtggaggctcccgtggagaggaggccgtgctgcctgctcatgtgaggctgttgctcagcatgcaggggccctgtcgcgggcacagcccaaggctgcctccccacggtgcgtgccctggtgctgcgggtgcagcacggaaaccccggcttctactgtacaggacactggcccctctcaggtcagaagacatgcctggagggatgtctggctgcaaagactatttttatcctgcaactcttgataaagggctgttttgccatggaaaaaaaaaaaaa

SEQ ID NO: 74 - DNA, 2738 bp, Homo sapiens
  CDS (103)..(2109)
gccgcggccaggtggtgcgggcggccctagcccggctgcggagcgctgcgcgagcggcgggctggctgaccccgagggacccccagcgcagcgggtgcggcgatgatcctggaggagaggccggacggcgcgggcgccggcgaggagagcccgcggctgcagggctgtgactccctgacgcagatccagtgcggccagctgcagagccgcagggcccagattcaccagcagattgacaaggagctgcagatgcggacgggcgctgagaacctctacagagccaccagcaacaaccgggtgagagagacggtcgccctggagctgagctacgtcaactccaacctgcagctgctgaaggaggagctggaggagctcagcggtggcgtggaccctggccggcatgggagcgaagctgtcactgtccccatgatccccctgggcctgaaggagaccaaggagctggactggtctacaccgctgaaggagctgatctcagtgcactttggagaggacggcgcctcctacgaggcagaaatcagggagctggaggccctgcggcaggccatgcggacccccagccggaatgagtcgggcctggagctgctcacagcctattacaaccagctgtgcttcctggatgcgcgcttcctcacccctgccaggagcctcgggctcttcttccactggtacgactcgcttactggggtcccggcccagcagcgtgccctggccttcgagaagggcagcgttctcttcaacatcggtgccctccacacgcagattggggcgcgccaggaccgctcctgcaccgagggtgcccgccgcgctatggaggccttccagagggccgctggggccttcagcctcctgagggagaacttctcccatgcgccgagcccagacatgagcgctgcgtccctctgcgcactggagcagctcatgatggcccaggcccaggaatgtgtgtttgagggcctctcaccacctgcctccatggccccccaagactgcctggcccagctgcgcctggcgcaggaggccgcccaggtggcagccgagtacaggctagtgcaccggaccatggcccagccacccgtccacgactacgtgcctgtctcctggactgccctggtgcatgtcaaggccgagtacttccgctccctggcccactaccacgtagccatggccctctgcgacggctccccgaccgagggagagctccccacgcacgagcaggtcttcctgcagccccccacctcctctaagccccgaggccctgtgctgccgcaggagctggaggagcgcaggcagcttggcaaggcacacctgaagcgtgccatcctggggcaggaggaggcgctgcggctgcacgccctgtgccgcgtcctgcgcgaggtggacctgcttcgggctgtgatctcccagacgctgcagcgctcactggccaagtatgcggagctcgaccgtgaggatgacttctgtgaggctgccgaggccccggacatccagcctaagacccaccagaagccagaggccaggatgccacgcctgtcccaggggaaggggcctgacatcttccatcggctggggcccctgtctgtgttctcagccaagaaccggtggcggctggtggggcccgtccacctgacccgaggagagggcggctttggcctcacgcttcggggagactcgcctgtcctcatcgctgccgtcattccagggagccaggccgcggcggctggcctgaaggagggcgactacattgtgtcagtgaatgggcagccatgcaggtggtggagacacgcggaggtggtgacggagctgaaggctgcgggagaggcgggcgccagcctgcaggtggtgtcgctgctgcccagctctagactgcccagcttgggggaccgccggcccgtcctgctgggccccagggggcttctaaggagccagagggagcatggttgcaagaccccggcatccacgtgggccagtccccggcccctcctcaactggagccgaaaggcccagcagggcaagactggaggctgcccccagccctgtgccccagtgaagccagctccgccctcatccttgaagcacccagggtggccgtgagggccaggatccctgcacgcctcagccctggctccagctggcagcaagcaccgagcatgccctccccacccagaggacctccgggcaatgcctgtcccgcctcatgctggaggctgcctcgggcacctgcctgcccattaaagactggtcagacgctgataattttagacatagaaatacaggggggagcgtcgcaacaaagaaagttatcaccttaggatgtggcgcccgaaaattgttttatggctttgcaaccaagtttttattggattccataggtttgttgccacctaagttaagggagctcgtgttattatgaagagttgaggctcagtgtgacccgtcattttaaaacagatgcggtcggtggactgtgtgggaaaagtgtctgactttgggacagatctctggtatgaacagcggaacccgtttgactattcgtgggggggggcgcacaaaattattgtggaaaaattacccgtcacagaaagaaataggaggttcccagtggttacattttcaaattcaaggtgctataaggtgtgtgtacacacacgatgaataatgacatcgatgtgactaaaagttagccaaaggacatttgcaatatgaaaacttgtacacgc

SEQ ID NO: 75 - DNA, 2380 bp, Homo sapiens
  CDS (68)..(2305)
ctcctgcgcacgcggccggtcgctgtcggaagcggctgtgcgggtggcggccggcgcgcggtggggcatggcgggttcgcggggtgcggggcgcacggcggcgccgagcgtgcggccggagaagcggcggtctgagcccgaactggagcctgagcccgagccggagccccccctcctctgcacctctcctctcagccacagcaccggcagcgattctggcgtctccgacagcgaggagagtgtgttctcaggcctggaagattccggcagtgacagcagtgaggatgatgacgaaggcgacgaggagggagaggacggagcccttgatgacgagggccacagtgggattaaaaagaccactgaggagcaggtgcaggccagcactccttgcccgaggacagagatggcgagcgcccggattggggatgagtatgcggaggacagctctgatgaggaggacatccggaacacggtgggcaacgtgcccttggagtggtacgatgacttcccccacgtgggctacgacctggatggcaggcgcatctacaagcccctgcggacccgggatgagctggaccagttcctggacaagatggacgatcctgactactggcgcaccgtgcaggacccgatgacagggcgggacctgagactgacggatgagcaggtggccctggtgcggcggctgcagagtggccagtttggggatgtgggcttcaacccctatgagccggctgtcgacttcttcagcggggacgtcatgatccacccggtgaccaaccgcccggccgacaagcgcagcttcatcccctccctggtggagaaggagaaggtctctcgcatggtgcacgccatcaagatgggctggatccagcctcgccggccccgagaccccacccccagcttctatgacctgtgggcccaggaggaccccaacgccgtgctcgggcgccacaagatgcacgtacctgctcccaagctggccctgccaggccacgccgagtcgtacaacccaccccctgaatacctgctcagcgaggaggagcgcttggcgtgggaacagcaggagccaggcgagaggaagctgagctttttgccacgcaagttcccgagcctgcgggccgtgcctgcctacggacgcttcatccaggaacgcttcgagcgctgccttgacctgtacctgtgcccacggcagcgcaagatgagggtgaatgtagaccctgaggacctcatccccaagctgcctcggccgagggacctgcagcccttccccacgtgccaggccctggtctacaggggccacagtgaccttgtccggtgcctcagtgtctctcctgggggccagtggctggtttcaggctctgacgacggctccctgcggctctgggaggtggccactgcccgctgtgtgaggactgttcccgtggggggcgtggtgaagagtgtggcctggaaccccagccccgctgtctgcctggtggctgcagccgtggaggactcggtgctgctgctgaacccagctctgggggaccggctggtggcgggcagcacagatcagctgttgagcgccttcgtcccgcctgaggagccccccttgcagccggcccgctggctggaggcctcagaggaggagcgccaagtgggcctgcggctgcgcatctgccacgggaagccagtgacgcaggtgacctggcacgggcgtggggactacctggccgtggtgctggccacccaaggccacacccaggtgctgattcaccagctgagccgtcgccgcagccagagtccgttccgccgcagccacggacaggtgcagcgagtggccttccaccctgcccggcccttcctgttggtggcgtcccagcgcagcgtccgcctctaccacctgctgcgccaggagctcaccaagaagctgatgcccaactgcaagtgggtgtccagcctggcggtgcaccctgcaggtgacaacgtcatctgtgggagctacgatagcaagctggtgtggtttgacctggatctttccaccaagccatacaggatgctgagacaccacaagaaggctctgcgggctgtggccttccacccgcggtacccactctttgcgtcaggctcggacgacggcagtgtcatcgtctgccatggcatggtgtacaatgaccttctgcagaaccccttgctggtgcccgtcaaggtgctgaagggacacgtgctgacccgagatctgggagtgctggacgtcatcttccaccccacccagccgtgggtcttctcctcgggggcagacgggactgtccgcctcttcacctagctgttctgcctgcctggggctggggtggtcgtgctgaagtcaacagagcctttaccctgtgcaaaaaaaaaa

SEQ ID NO: 76 - DNA, 1342 bp, Homo sapiens
  CDS (122)..(1327)
gggtaactttgctgtgctgttttttgagcagttgtctggtccctggaagtgtagcatcgagagagttgtctaattacgtttacaaaatatcttccctttggccatacaagtggtgactgccatgtcgaactcgcggcccaggtcccgccgagacgccgggggtggcgctggggcagccggccgggacgagctggtgtcgcggtccttgcagagcgcagagcactgtctgggcgtccaggacttcggcactgcctatgcccactacctcctcgtgctcagcctggcgccggagctgaaacacgacgtgaaggaaacttttcagtacacacttttcagatgggctgaagagcttgatgctctcagtcggatacaagacttacttggttgctatgagcaggccttggaactgtttcctgatgatgaagtgatttgcaatagtatgggggagcatctcttcagaatgggctttagggatgaagcagctgggtattttcataaagcagtgaagctaaaccctgatttcagtgatgcaaaggagaatttttatcgtgttgcaaactggttggtggaacgctggcactttatcatgcttaatgacaccaagaggaatacaatttataatgcagcaatccaaaaggcagtttgtttggggtccaaaagtgttttggacattggagcaggaactggaatactaagcatgtttgctaaaaaagctggagcacattccgtgtatgcctgtgagttatccaagaccatgtatgaacttgcctgtgatgtcgtggcagcaaacaagatggaagcagggatcaaactcttacatacgaagtcacttgacatagagattccaaaacatattcccgaaagagtgtccctagttgtaacagaaactgtcgatgcaggtttatttggagaaggaattgtggagagtttgattcatgcatgggagcatttacttttacagccaaagaccaaaggtgaaagtgctaattgtgaaaagtatgggaaagttataccagcaagtgctgttatatttgggatggcagtagaatgtgcagagataagaagacatcatagagtgggtattaaggacattgctggtatccatttgccaacaaatgtgaaatttcagagtccggcttattcttctgtagatactgaagaaacaattgaaccttatacaactgaaaagatgagtcgagttcctggaggatatttggctttgacagagtgctttgaaattatgacagtagatttcaacaaccttcaggaattaaaaagtcttgcaactaaaaagcctgataagattggtattccttgtttaattttttaaaaaaaaaaaaaa

SEQ ID NO: 77 - DNA, 3493 bp, Homo sapiens
  CDS (65)..(1234)
gcgggagtagcgcagtcgccaaagccgccgctgccaaagctgccgccactagccgggcatggccatggcgtccccggccatcgggcagcgcccgtacccgctactcttggaccccgagccgccgcgctatctacagagcctgagcggccccgagctaccgccgccgccccccgaccggtcctcgcgcctctgtgtcccggcgcccctctccactgcgcccggggcgcgcgaggggcgcagcgcccggagggctgcccgggggaacctggagcccccgccccgggcctcccgacccgctcgcccgctccggcctggtctgcagcagagactgcggcggcggcctggagcgccccgaccccgcgacgtgcggagcatcttcgagcagccgcaggatcccagagtcccggcggagcgaggcgaggggcactgcttcgccgagttggtgctgccgggcggccccggctggtgtgacctgtgcggacgagaggtgctgcggcaggcgctgcgctgcactaactgtaaattcacctgtcacccagaatgccgcagcctgatccagttggactgcagtcagcaggagggtttatcccgggacagaccctctccagaaagcaccctcaccgtgaccttcagccagaatgtctgtaaacctgtggaggagacacagcgcccgcccacactgcaggagatcaagcagaagatcgacagctacaacacgcgagagaagaactgcctgggcatgaaactgagtgaagacggcacctacacgggtttcatcaaagtgcatctgaaactccggcggcctgtgacggtgcctgctgggatccggccccagtccatctatgatgccatcaaggaggtgaacctggcggctaccacggacaagcggacatccttctacctgcccctagatgccatcaagcagctgcacatcagcagcaccaccaccgtcagtgaggtcatccaggggctgctcaagaagttcatggttgtggacaatccccagaagtttgcactttttaagcggatacacaaggacggacaagtgctcttccagaaactctccattgctgaccgccccctctacctgcgcctgcttgctgggcctgacacggaggtcctcagctttgtgctaaaggagaatgaaactggagaggtagagtgggatgccttctccatccctgaacttcagaacttcctctcctcctggtgcattcagatttatttgtattattaattattattttgcaacagacactttttctcaggacatctctggcaggtgcatttgtgcctgcccagcagttccagctgtggcaaaagtctcttccatggacaagtgtttgcacgagggttcagctgtgcccgcccccaggctgtgccccaccacagattctgccaaggatcagaactcatgtgaaacaaacagctgacgtcctctctcgatctgcaagcctttcaccaaccaaatagttgcctctctcgtcaccaaactggaacctcacaccagccggcaaaggaaggaagaaaggttttagagctgtgtgttctttctctggcattgattcctctttgagttctcttacttgccacgtacaggaccattatttatgagtgaaaagttgtagcacattccttttgcaggtctgagctaagcccctgaaagcagggtaatgctcataaaaggactgttcccgcggccccaaggtgcctgttgttcacacttaagggaagtttataaagctactggccccagatgctcagggtaaggagcaccaaagctgaggctggctcagagatctccagagaagctgcagcctgccctggccctggctctggccctggcccacattgcacatggaaacccaaaggcatatatctgcgtatgtgtggtacttagtcacatctttgtcaacaaactgttcgtttttaagttacaaatttgaatttaatgttgtcatcatcgtcatgtgtttccccaaagggaagccagtcattgaccatttaaaaagtctcctgctaagtatggaaatcagacagtaagagaaagccaaaaagcaatgcagagaaaggtgtccaagctgtcttcagccttccccagctaaagagcagaggagggcctgggctacttgggttccccatcggcctccagcactgcctccctcctcccactgcgactctgggatctccaggtgctgcccaaggagttgccttgattacagagaggggagcctccaattcggccaacttggagtcctttctgttttgaagcatgggccagacccggcactgcgctcggagagccggtgggcctggcctccccgtcgacctcagtgcctttttgttttcagagagaaataggagtagggcgagtttgcctgaagctctgctgctggcttctcctgccaggaagtgaacaatggcggcggtgtgggagacaaggccaggagagcccgcgttcagtatgggttgagggtcacagacctccctcccatctgggtgcctgagttttgactccaatcagtgataccagaccacattgacagggaggatcaaattcctgacttacatttgcactggcttcttgtttaggctgaatcctaaaataaattagtcaaaaaattccaacaagtagccaggactgcagagacactccagtgcagagggagaaggacttgtaattttcaaagcagggctggttttccaacccagcctctgagaaaccatttctttgctatcctctgccttcccaagtccctcttgggtcggttcaagcccaagcttgttcgtgtagcttcagaagttccctctctgacccaggctgagtccatactgcccctgatcccagaaggaatgctgacccctcgtcgtatgaactgtgcatagtctccagagcttcaaaggcaacacaagctcgcaactctaagatttttttaaaccacaaaaaccctggttagccatctcatgctcagccttatcacttccctccctttagaaactctctccctgctgtatattaaagggagcaggtggagagtcattttccttcgtcctgcatgtctctaacattaatagaaggcatggctcctgctgcaaccgctgtgaatgctgctgagaacctccctctatggggatggctattttatttttgagaaggaaaaaaaaagtcatgtatatatacacataaaggcatatagctatatataaagagataagggtgtttatgaaatgagaaaattattggacaattcagactttactaaagcacagttagacccaaggcctatgctgaggtctaaacctctgaaaaaagtatagtatcgagtacccgttccctcccagaggtgggagtaactgctggtagtgccttctttggttgtgttgctcagtgtgtaagtgtttgtttccaggatattttctttttaaatgtctttcttatatgggttttaaaaaaaagtaataaaagcctgttgcaaaaatgaaaaaaaaaaaa

SEQ ID NO: 78 - DNA, 1330 bp, Homo sapiens
  CDS (138)..(1169)
gctcggtggccgagtcggtcccgcggcggcggatcgggcgcgcgcgtcgggggtcgtccggctgccaggcagggcgagcacgcgccgggaggccttggaggcgtagggggcgggggtacggctcgcctgctcgcaagatggcggacgaggacggggaagggattcatccctcagcccctcacaggaacggaggtggcggcggcggcggggggtctgggctccactgcgccgggaacggcggcgggggaggcggcggccgcgggtcgtgcgcatcgtcaagtccgagtccggctacggcttcaacgtgcggggccaagaaccacgtgaatgttgagggggcgacacacaagcaggtggtggacctgattcgagcaggcgagaaggaattgatcttgacagtgttatctgtacctcctcatgaggcagataacctagatcccagtgacgactcgttgggacaatcattttatgattacacagaaaagcaagcagtgcccatatcggtccccagatacaaacatgtggagcagaatggtgagaagtttgtggtatataatgtttacatggcagggaggcagctgtgttctaagcggtaccgggagtttgctatcctacaccagaacctgaagagagagtttgccaactttacatttcctcgactcccagggaagtggccattttcattatcagaacaacaattagatgcccgacgtcggggattggaagaatatctagaaaaagtgtgttcaatacgagtaattggtgagagtgacatcatgcaggaattcctatcagaatccgatgagaactacaatggtgtgtccgacgtagagctgagagtagcattaccagatggaacaacggttacagtcagggttaaaaagaacagtactacagaccaagtatatcaggctatcgcagcaaaggttggcatggacagtacgacagtgaattactttgccttatttgaagtgatcagtcactcctttgtacgtaaattggcacctaatgagtttcctcacaaactctacattcagaattatacatcagctgtgccaggcacctggcttgaccattcgaaagtggctttttacaacagaagacgacaatcctctctaatgacaatgaccttgctgttacctacttctttcatcaggcagcgaatgatgtgaagaaaggttacattcaaagcagaagaaacaagtcctatcaattacagaagctatacgaacaaagaacaaatggtcatgtacctcaacatgctacggacttgtgagggctaccatggcaatcatctttccccactgtgcctgtgactccggcagaaggg

SEQ ID NO: 79 - DNA, 4013 bp, Homo sapiens
  CDS (22)..(3369)
ggcggcggctagggatcagacatggcggcggatctgaacctggagtggatctccctgccccggtcctggacttacgggatcaccaggggcggccgagtcttcttcatcaacgaggaggccaagagcaccacctggctgcaccccgtcaccggcgaggcggtggtcaccggacaccggcggcagagcacagatttgcctactggctgggaagaagcatatacttttgaaggtgcaagatactatataaaccataatgaaaggaaagtgacctgcaaacatccagtcacaggacaaccatcacaggacaattgtatttttgtagtgaatgaacagactgttgcaaccatgacatctgaagaaaagaaggaacggccaataagtatgataaatgaagcttctaactataacgtgacttcagattatgcagtgcatccaatgagccctgtaggcagaacttcacgagcttcaaaaaaagttcataattttggaaagaggtcaaattcaattaaaaggaatcctaatgcaccggttgtcagacgaggttggctttataaacaggacagtactggcatgaaattgtggaagaaacgctggtttgtgctttctgacctttgcctcttttattatagagatgagaaagaagagggtatcctgggaagcatactgttacctagttttcagatagctttgcttacctctgaagatcacattaatcgcaaatatgcttttaaggcagcccatccaaacatgcggacctattatttctgcactgatacaggaaaggaaatggagttgtggatgaaagccatgttagatgctgccctagtacagacagaacctgtgaaaagagtggacaagattacatctgaaaatgcaccaactaaagaaaccaataacattcccaaccatagagtgctaattaaaccagagatccaaaacaatcaaaaaaacaaggaaatgagcaaaattgaagaaaaaaaggcattagaagctgaaaaatatggatttcagaaggatggtcaagatagacccttaacaaaaattaatagtgtaaagctgaattctctgccatctgaatatgagagtgggtcagcatgccctgctcagactgtgcactacagaccaatcaacttgagcagttcagagaacaaaatagtcaatgttagcctggcagatcttagaggtggaaatcgccccaatacagggcccttatacacagaggccgatcgagtcatacagagaacaaattcaatgcagcagttggaacagtggattaaaatccagaaggggaggggtcatgaagaagaaaccaggggagtaatttcttaccaaacattaccaagaaatatgccaagtcacagagcccagattatggcccgctaccctgaaggttatagaacactcccaagaaacagcaagacaaggcctgaaagtatctgcagtgtaaccccttccactcatgacaagacattaggacccggagcggaggagaaacggaggtccatgagagatgacacaatgtggcagctctacgaatggcagcagcgtcagttttataacaaacagagcaccctccctcgacacagtactttgagtagtcccaaaaccatggtaaatatttctgaccagacaatgcactctattcccacatcaccttcccacgggtcaatagctgcttatcagggatactcccctcaacgaacttacagatcggaagtgtcttcaccaattcagagaggagatgtgacaatagaccgcagacacagggcccatcaccctaagcatgtctatgtgcctgacagaaggtcagtgccagctggcctgactttacagtctgttagtccccagagcctccaagggaaaacgctgtcacaagatgaaggtagaggcacattatacaaatacagacctgaagaagtagatattgatgccaagttaagccgattatgtgaacaagataaagtggtgcatgctctggaagagaaacttcagcaactccacaaggagaaatacacgcttgagcaagctttgctatcagccagccaagagatagaaatgcatgcagataacccagcagccattcagacagtggtgttacaaagggatgatttacaaaatggactgcttagtacgtgtcgagaactttctcgagccactgccgaattggaacgagcatggagagaatatgataagttagaatacgatgtaactgttaccaggaaccagatgcaagagcagctggatcaccttggtgaagttcagacggaatcagcaggaattcagcgtgcacagattcagaaagaactttggcgaattcaggatgtcatggaagggctgagtaaacataagcagcaaagaggtactacagaaataggtatgataggatcaaagcctttctcaacagttaagtacaaaaatgagggtccagattatagactctacaagagtgaaccagagttaacaacagtggcagaagttgatgaatctaatggagaagaaaaatcagaacctgtttcagagatagaaacttcagttgttaaaggttcccactttcctgttggagtagtccctccaagagcaaaatcaccaacacccgaatcttcgacaatagcttcctatgtaaccttgaggaaaactaagaagatgatggatctaagaacggaaagaccaagaagtgcagtggaacagctctgtttggctgaaagtactcgaccaaggatgactgtggaagagcaaatggaaagaataagaagacatcaacaagcgtgcctgagggagaagaaaaaagggttaaatgttatcggtgcttcagaccagtcacccttacaaagcccttcaaatttaagggataatccatttaggactactcagactcgaaggagggatgataaggaactggacactgccattagagaaaatgatgtaaagccagaccatgaaactcctgcaacagaaattgttcaactaaaagaaaccgaaccccaaaatgtggacttcagcaaagagttaaaaaaaactgaaaacatttcatatgaaatgctttttgaacctgagccaaatggagtaaattctgtggaaatgatggataaagaaagaaacaaagacaaaatgcctgaggatgttacattcagccctcaagatgaaacacagaccgcaaatcataaaccagaagagcatcctgaagaaaatacaaagaacagtgttgacgaacaggaagaaactgttatttcttacgaatcaactcctgaggtttctagaggaaatcaaacaatggcagtgaaaagtctgtccccatctcctgagtcctcggcatcgccagttccatccactcagccgcagctcacagaaggatcacatttcatgtgtgtgtagtcttagaagaactatactgacttctgttgaaaccattcaaagctaaagacatggaccttcagcagtgtaagaagatattgtacagtatattttaaatctatgaaattcatagttctgatgcttttggtcacagagcatcattttatcacttctggaaaatgtttattccaaaacagctttaatggcccatatgtacacttcgtaatctcaaggttattattctgacaccagcttgctgctatgatttcagagcacataagtaaaggtgctttttaatgtgcagtctatttccagagcttacttagttgctgatttccagatttcgatgtttcttaagtctaggtgaatttatatatatatttttttgcttttcattttctaaagttagttattatttccattgaagcttgttttctttttttcttcccattttagctactgcagtgcttttgtttcacacttgatttgtaaaaattttatatatatgtatttaaaatgtgccattttattgctaagtgaagtatgtcctgttttctgctataattctttctcggtcagattgcaatgtcagcagttactgccacactcctgtcagcttaaacacaaatgttactgcttatcttttcttaaaaaaaaaaaaa

SEQ ID NO: 80 - DNA, 548 bp, Homo sapiens
  CDS (15)..(533)
gcccttgagccgccatgggatcagggttccaggaactcaggatctgcagtgaggaccagacaccactgattgcaggaatgtgttccctccccatggcaagatactacataattaaatatgcagaccagaaggctctatacacaagagacggccagctgctggtgggagatcctgttgcagacaactgctgtgcagagaagatctgcacacttcctaacagaggcttggaccgcaccaaggtccccattttcctggggatccagggagggagccgctgcctggcatgtgtggagacagaagaggggccttccctacagctggaggatgtgaacattgaggaactgtacaaaggtggtgaagaggccacacgcttcaccttcttccagagcagctcaggctccgccttcaggcttgaggctgctgcctggcctggctggttcctgtgtggcccggcagagccccagcagccagtacagctcaccaaggagagtgagccctcagcccgtaccaagttttactttgaacagagctggtagtgatcaagcttc

SEQ ID NO: 81 - DNA, 1173 bp, Homo sapiens
  CDS (145)..(738)
ccccaggaccttgggccccgtcctagtgacgacggagaagagggccgctgccgctgcagtggctcgtgggtgagagcaagtgaagaccgccgcagcatcaggggcctggactcaactcctccccagagtcggaggtgttgcgccatgcccggggtggccaattcaggcccctccacttcctctagggagactgcaaacccctgttccaggaagaaggtgcattttggcagcatacatgatgcagtacgagctggagatgtaaagcagctttcagaaatagtggtacgtggagccagcattaatgaacttgatgttctccataagtttacccctttacattgggcagcacattctggaagtttggagtgtcttcattggctgctctggcatggagctgatatcacacacgtaacaacgagaggttggacagcatctcacatagctgcaatcaggggtcaggatgcttgtgtacaggctcttataatgaatggagcaaatctgacagcccaggatgaccggggatgcactcctttacatcttgctgcaactcatggacattctttcactttacaaataatgctccgaagtggagtggatcccagtgtgactgataagagagaatggagacctgtgcattatgcagcttttcatgggcggcttggctgcttgcaacttcttgttaaatggggttgtagcatagaagatgtggactacaatggaaaccttccagaacctccttagatccctgtggagcctctgattccttggcttggcatgctggacttacataatttggcacctacctacctgcatggcctcatctttctatatctttacactactgtccaggatcattttgtttttttctgaaggtcgtctttcagtgttcatttagtgaagtcttttggtatgaactctttcaatttttgggtatctgaaaatttattttgttctcattctttttactttgtattttgtaagttttttttttttttaaagtaaaatttaaattgaagtctcaaaaaacaaaaagcccctctctcggcgctgcctacggaggtggcagccatctcctcctcagcatcatggccaccctcagaccccttgtgaagcccaggatcatcaaaaagagaactaagaagttcttccggcaccagactgactgatatgtca

SEQ ID NO: 82 - DNA, 1139 bp, Homo sapiens
  CDS (7)..(915)
ctgggaatgggagcagtaagctgtcggcaggggcagcacacccagcagggggaacacacccgggtggctgtccctcacaagcagggtggcaacatccggggtccctgggcccgaggctggaagagcctctggacaggtttgggaaccatcaggtcagatctggaagaactctgggaactacgggggcaccactatctgcaccaggaatccctaaagccagccccagtactggtagagaagcctctgccagagtggccagtgcctcagttcatcaacctctttctaccagagtttcccattaggcccattagggggcagcagcagctgaagattttaggcctcgtggctaaaggctcctttggaactgtcctcaaggtgctagattgcacccagaaagctgtatttgcagtgaaggtggtgcccaaggtaaaggtcctacagagggataccgtgaggcagtgcaaagaggaggttagcatccagcgacagatcaaccatccctttgtacacagcttgggggacagctggcagggaaaacggcaccttttcattatgtgtagctactgcagcacagatctgtactccctttggtcggctgttggctgctttcctgaggcttccatccgtctctttgctgccgagttggtgctggtactgtgttatctccatgacttgggcatcatgcatcgagatgtgaagatggagaatattcttctagatgaacgaggccatctgaaactgacagactttggtctgtcccgccacgtgccccagggagctcaagcctacactatctgtggcactcttcagtacatggccccagaggtcctaagtggaggaccttacaaccatgctgctgattggtggtccctgggtgtcttgcttttctctctggcgactggaaaggtgagagaatagtagtagttttgggcagagaagagctttgccttgtggtgggaagaaggaagaccttaggaaatcttgccgtattcctactaaggaatgaacccctacccctacctccactccctacctcttaactcagtttccagtggctgcagagagagatcatgtggccatgttggcaagtgtgacccacagtgactctgagatcccagcttctcttaaccagggcctcg

SEQ ID NO: 83 - DNA, 1818 bp, Homo sapiens
  CDS (1)..(1815)
atggagattgtgtacgtgtacgtcaagaagcgcagcgagttcgggaagcagtgcaatttctcggaccgccaggccgagctgaacatcgacatcatgcccaaccctgagctggccgagcagttcgtggagcggaacccagtggacacgggcatccagtgctcgatcagcatgtcggaacacgaggccaactcagagcggtttgagatgaagacccggggagttaaccatgtcgaggggggctggcccaaggacgtgaaccccctggagctggagcagaccatccgtttccggaagaaagtggagaaagatgagaactacgttaacgccatcatgcagctcggctctatcatggagcactgcatcaagcagaacaatgccattgacatctatgaagagtatttcaatgacgaggaggccatggaagtgatggaggaggacccttcagctaaaaccatcaatgtgttcagggacccccaggaaatcaagagggctgccacacacctctcctggcaccccgatggcaacaggaagttggcagtggcatactcctgcttggattttcagcgggcacctgtgggcatgagcagcgattcatacatctgggacctggaaaaccccaacaagcctgaacttgctctgaagccatcgtctccactcgtgacgttggagttcaaccccaaagattcccacgtactcctgggtggctgctacaatggacagatagcctgctgggacacccgaaagggcagcctggtggcggagctatccaccattgagtccagccaccgagaccctgtgtatggcaccatctggctgcagtcgaagacgggcaccgagtgcttctcagcttccacggatgggcaggtcatgtggtgggacatccgaaagatgagcgagcccactgaagttgtgatcttggacatcaccaagaaggaacagttggaaaatgccttgggggccatctccctggagttcgaatctactttgcccaccaagttcatggtggggaccgagcagggcatcgtcatctcctgcaaccgcaaggccaagacgtcagctgaaaagattgtgtgcaccttcccgggccatcatggccccatctacgccctccagagaaaccccttctacccgaagaacttcctgacggttggcgactggacagcccgcatttggtctgaagacagccgggaatcgtccatcatgtggaccaagtaccacatggcttacctcactgatgctgcctggagccccgtgaggccgaccgttttctttaccaccaggatggacggaaccctggatatctgggacttcatgttcgagcagtgcgatcccaccctcagcttgaaggtgtgtgacgaggccctcttctgcctccgggtgcaggacaatgggtgtctcatcgcctgcggctcccagctggggacaaccaccctgctggaggtctcgcctgggctctctaccctccagaggaatgagaagaacgtagcctcttccatgtttgagcgtgagacccggcgagagaagatcctggaggccaggcaccgggagatgcggctgaaggagaagggtaaggcggagggcagggatgaggagcagaccgatgaggagctggccgtagacctggaggcgctggtcagcaaggccgaggaggagttcttcgacatcatcttcgcagagctgaagaagaaggaggcagacgccataaagctgacgccagtgcctcagcaaccaagtccagaagaagaccaggtggtggaggagggagaggaagcagcgggggaagaaggggatgaagaagtggaagaagacttagcctag

SEQ ID NO: 84 - DNA, 3104 bp, Homo sapiens
  CDS (341)..(1780)
gagacgatgaggatgtactctcagaaaaaaattgccaaataaatgtcggtaagagaattgccctggtggaaaatattcctgaaggccttaactattcagaaaatgcaccatttcacttatcacttttccaaggctggatgaatttactcaacatggccaaaaagtctgttgacatagtgtcttcccattgggatctcaaccacactcatccatcagcatgtcagggtcaacgtctttttgaaaagttgctccagctgacttcgcaaaatattgaaatcaagctagtgagtgatgtaacagctgattcaaaggtattagaagccttgaaattaaagggtttatgcaccactggtcctacccctgtgcagtcctccaactgcggcagcccggctctgccctgactccactgaaactaccttgtcaaagtcccggaggacttccaggagccgaggtgacgtacatgaacatgaccgcttacaacaagggccggctgcagtcctccttctggatcgtggacaaacagcacgtgtatatcggcagtgccggtttggactggcaatccctgggacagatgaaagaactcggtgtcatcttctacaactgcagctgcctggtcctagatttacaaaggatatttgctctatatagttcattaaaattcaaaagcagagtgcctcaaacctggtccaaaagactctatggagtctatgacaatgaaaagaaactgcaacttcagttgaatgaaaccaaatctcaagcatttgtatcgaattctccaaaactcttttgccctaaaaacagaagttttgacatagatgccatctacagtgtgatagatgatgccaagcagtatgtgtacatcgctgtcatggactacctgcctatctccagcacaagcaccaaaagaagtagcatcaccaggtctgctttagatggatcactgcggtggtcatcgatgaagtacatgactggaggcagagaaaccaattttgagcacaaggctgagatgatctttcctgtagtcctcagcttcatgggtataaaaccagacaaagaaaactgtagcgtggatccaggatctagatttttgccaagagcaagaggaaggacttactggccagacttggatgcaaaaataagagaagcattagttttacgaagcgttagagttcgactccttttaagcttctggaaggaaactgatccccttacgtttaactttatttcatctcttaaagcgatttgcactgaaatagccaactgcagtttgaaagttactgtgaccaacagagcactggagcatgcagcagcacacagaccccccgcccagatgcctcgtcgtctgggtccccatgcttgccccaggtcccttgggccacgtactaatccccctctggagaccttgagggagaaattttttgatctggaaagagagaatgcttgtgctacaaaagaacaaaagaatcacacctttcctaggttaaatcgcaacaagtacatggtgacagatggagcagcttatattggaaattttgattgggtagggaatgatttcactcagaatgctggcacgggccttgttatcaaccaggcagatgtgaggaacaacagaagcatcattaagcaacttaaagatgtgtttgaaagggactggtattcaccgtatgccaaaaccttacagccaaccaaacagccgaactgctcaagcctgttcaaactcaaacccctctccaacaaaactgccacagacgacacaggcggaaaggatccccggaacgtataacatgatgaagaaactgacaggacagctctgtatttcatatttatacataaaggacttgaggagagaaaaaacactttaatatgtctctttttttagggaaaaagcacacttataaaaaatattctctgaacaacacataatacctatctaacaatatcttagcgtcgtgtacactaaaattaagacttttgtatttgttacctctgacagagaatgtcattctggcgtagaagttagtttttacgtttgcatacaaattttaagactttcattcctgctcctttctagttttagaactttttctgctgacctacccggtcagttgttaggaagcttagcatgaggtgggctctttaacaccattctgagaactgttgatttagagaggaaggtgaggattttgccttggagaagagactgataaaaccaagtgtttattcttgtaaatcgtctccaagacctacacagtcagctaagcatgaatagcttacatctcatggccagccttcaacacccttgaaaaatatccttttctgtcttgctcattttcttcttataccataagttttattgggtatcattttctcttctcacaaaatgttcctattatatagcattttctgtattcacctcaacattacttctaactatgataacatcttttgaaaacatacaaatttttcagaatggatactaagtggaaatagcagtctttcattttcacctttcaactgaatccttttttcccctaccgaattggtatttaaaaaaaatcacagtcagcaatatgtatcctttctctcaagctcagaaaaattatgtagccacctgctaatatccagcaagctatcaagtctgcattttgggaataaagtagtttttcacatttttgttcagtttatggtattataaaggaaaaaatctctatgcgtcagtggattttaatttctttagaatcattatgctgttaagagtatgccagcaaacgtttctagagctatttaatataccttctgctatttaatataccaaatgcttttcagagaaatgcaatttaaatactgtgcttaacatattttactaagaagcagaaatattgaattattgttctataacgtaattgtgtgttgtggttttatatctatacaatatatacccctgtattaatggagaccattgctacactagggagaggcatggcctcttcagagcccacagcaggtggccgggatgtccagttccaatgttgttcccgactctgtgactcaaagcggagcccctcactgcttggcctcgggcttctcttggtaatgtagacggt

SEQ ID NO: 85 - DNA, 3774 bp, Homo sapiens
  CDS (308)..(1675)
aaagaagcaaatagaaggcattccaggcaaaaggaactgcatcgagtaaaagcatggaggcaagaaagggcttggtgtgtttgagaaacagtgagtagggcatggtggtggcagaagcttaaagtgtatggcccgtggacagtgacagccggacaagaagctgaagtgacagaacaagttgaaccaaaggaattccagacctgggaaagtggagaaagaattttggggtcagagccgtttaagactttgcctagggcctgggtcttctttctcctaaaggcctcaacccacagcacgccacacaaatatgtcacataacacacaaacaaacatcatatttcacagtccaggaaatgaaatgaagacaaaagcgccccctgtgggtgaagtcacagtcactgcagcagacatcatggctgtggatgtggcagaataccatctgagcgtcatcaagagcccccctggctgggaggtgggtgtctatgctgcaggggccctggctctgctgggaatcgcagctgtgagcctgtggaagctctggacgtcggggagcttccccagcccctctccgttccccaattacgactacaggtaccttcagcagaagtacggcgagagctgcgcagaggccagggagaagagagtgcctgcctggaatgcccagcgggccagcacgcggggaccacccagccgcaaaggcagtctcagcattgaggacacctttgagagcatcagtgaactggggcctctggagctgatgggccgggagttggacctggccccctatgggaccctccggaagtcccagtcggccgactccctgaactccatctcctccgtgagcaacacctttgggcaggacttcacactgggccaggtggaggtgagcatggagtacgacactgcctcccacacgctgaacgtggcggtgatgcagggcaaggacctcctggagcgggaggaggccagcttcgagtcctgcttcatgcgcgtcagcctgctgccggacgagcagatcgtgggcatttctcggatccagagaaatgcctactccatcttctttgatgagaagttctccatccccctggatcccacagccctggaggagaagagcctgcggttttctgtatttggcatcgatgaggatgagcgcaacgtcagcacgggggtggtggagctgaagctttctgtgcttgacctcccgctgcagcccttcagtggctggctctatttacaggaccagaacaaggccgccgatgctgtgggggagatcctgctctccctcagctacctccccacagccgagcgcctcaccgtggtcgtggttaaggccaagaacctcatctggaccaacgacaagaccacagcggaccccttcgtcaaggtgtacctgctgcaggatgggaggaagatgagcaaaaagaagacagccgtgaagagggatgaccccaacccggtgttcaacgaagccatgatcttctcggtgccagccattgtgctccaggacctgtctctccgcgtgacggtggctgagagcagcagcgacggccgtggggacaacgtgggccatgtcatcattgggccgtcagccagtggcatgggaaccacacattggaaccagatgttggccacgctgcgcaggcccgtgtccatgtggcacgctgtccggcgaaactagcaaccagggcgggccagttgggcaatggagctgctggagcccggtacccactcagctctgtctgatgccctctccatagcccagctggagccgtgaacactggggtcccctggcagagtcctcatgacccatcctggtctctctgtccagattgcagcagaggagtgggcgtggctctgtgtccagggccccagggtctgctcctgctgaggaccagctgtggctgggccaggacagaggactcaaccctgctcctcccggtaggccagctgccgagctgggctatgttctggaacccagtgaatcttgggggccaggcactgtgctaggcaccagcaggggtaacacaaagaagacccggcccttagggcatcaggaagactagctcccctgccccggaggatctgctcagtgctgatggcagcccagctgtgtggactcagggggctctgagggctagggaaacaggaagggcctctttgacaaggtaggagctgtgcttggaggggcaggaaaagaactgagcatgtcgcaggcagcgggcccagcctgagcaatggcaggatgtgaacttccccatcgcaaatgcagttctcagcccactgcagtggatacaaggaagggcctttctcggggccggagaagagaccaagagaccaggcccgggcagcagcctaccggccacgtggaacactggctccggagttattctctgtcaaatctactccccggacctcaaccatggcaagaaccagaggtccaaagaggcccagacccaggtccttgtgctcagtcctgcgcaaaccaggcccagaccctgcaagcatttgttgatgcccttgcaggcccactgggagaaagatgcctcaggcaggtctcagcctgggggtggcaggggtggggcagagagaatactgacagcagaggtcttggtgggctgcacgtgcctgcgaagatgtggtggacaaggaggctctcgggctgggccttggaggggtggcagcggaaggacagcccaggtggctgaggcctgatgggaagccggggaaggccagggtggaagggcggcttgagggacgccaggagaagactgaatgccaggctaggaaggaggcggctctcgatcacggggtgggtgcccccgacaccgggtctcctagcttgagttccctagaagcgaaatctgagagggggattctggggcaagtagtttcttgcgggtgagtgttctcagagaaacttaccagatcaagaaagggagctcaggctggatggaggaagccacgcaagtgtggcttcaagatccatcgccttggcctgatcgctgtgggggcaggggcctggagtacgaggggcaccctgggggctcccacccagaagcagaggggctgggctgttgcacctctactggcatcagtctttggttaccccccagccccagtaggaggagagcaggcagagcttgtcatccccagcctggtgtcccgcagtcccaggaagccgcttcttgccttcatggctgagtgctgggaagggctgagctcacccaggccagcaggtggggtatcatctgctcggtggggccacccacaggtgacagcatggaccctcaggctggctgcccctgttccttggtccataactggtgagctatggagacccaggccaacaaattatccccagtgatatggggggaggaggggctagaacaagggcccaggggactggaggcaggatggtggctttccctacctgacacagccatggcccagccccaaggccaggctgtctaccctatggccacagcaggaggtcagcccagggccaggagacacatggctggacaaggctttgcagcctgggagaccccgactttctctaacccagtggctgtgcggtgcaggccactgactccccccctgccctctcccctctctccctccccctaactgcatgacatgttaactgtgtgcccaggacagccgtggtggggaccgggtatgccaactggaatgattctagaaccaaaataaagttggggcaggaagagggggcttccagggagccctgctcggccctgaatcaaaaaaaaaaaa

SEQ ID NO: 86 - DNA, 1235 bp, Homo sapiens
  CDS (14)..(1096)
gggccaagagaccatggccacgttagcccggctgcaagctaggtcgtcgactgtaggaaatcagtactactttaggaacagtgttgtagatccatttagaaaaaaggagaatgatgcagcagttaaaatccaaagctggtttcgaggatgtcaagttcgggcatatatcaggcatttaaacaggattgtaacaattattcaaaaatggtggagaagtttcttaggcagaaagcaatatcaactaactgtgcaggtagcatattatactatgatgatgaatctctacaatgcaatggctgtcaggattcagagacgatggcgaggctatagggttcggaagtacctctttaattattattatttgaaagagtacctgaaagtcgtttcagagaccaatgatgcaattaggaaggcactggaggagtttgcagaaatgaaagaaagagaagagaagaaggctaacctcgaaagggaagagaagaaaagagattaccaagcccgaaagatgcattacctcctcagcacaaagcagattccaggaatatacaattcacccttcagaaaagagcctgatccatgggagctgcaattacagaaggcaaagcctttaacacaccgaagacctaaagttaagcagaaggactccaccagccttactgattggctagcttgtacaagcgcccgttcttttcctcggtctgaaattctaccacctattaatagaaagcaatgtcaggggcccttccgagatatcaccgaagtattagaacaacgctacaggcctttggagccaacgttgcgggtggcagaaccaatcgatgagttaaagttggccagagaggagctcagaagagaggaatggctgcaaaatgtaaatgacaatatgtttttgccattttcttcataccataaaaatgaaaagtacatcccatcaatgcatttatcaagcaagtatggtcctatttcttacaaagaacaattccgaagtgaaaatcctaagaaatggatctgtgacaaggatttccagactgtattaccatcatttgagctcttctcaaagtatggaaaattatattcaaaagctggacagattgtataaaggcgtcagaagaagaaactgaagccatctgcattttaaaacttaacagttctgaaaggaaaacacagatgaagatcctgtaggaaatatacttgctatgattcaataaactataaaattttgtaaaaaaaaaaaa

SEQ ID NO: 87 - DNA, 3252 bp, Homo sapiens
  CDS (1)..(3249)
atgaaaggaggaattgactttgccatggacctcagtaccagggcaacctccatgggcccaaggagaagtttagcccctgcagacataaactccaggctggctcttgcaaacccaagctccaggcctgcccagtgccaggtcactgcttatggaaccaggctccagacatgctcctttatacccaggcaccagatgcaccccagtgctaggccagccctcatggtcccagactctcggctaagcacctacagactcaggttccaggctggtccccaggaacccaggcttcagtcctatccctgtggactcaggtcaaagacctatgccggcaccaagtcagacgcaaaggatccaggttccaggctggcttctgcaaacatagcctctcctgagtttgtaaagatgcctcagctcctgagaaatgtcctctgtgtaattgagacattccacaaatatgccagtgaggacagtaacggggcaacactgactggcagagagctgaaacaactcatccagggcgagtttggggacttttttcagccctgtgtccttcatgctgtggaaaaaaattcaaatcttctgaatattgacagtaatggcatcatcagttttgatgaatttgttcttgcaatcttcaacttgttgaacctctgttatcttgacataaaatcattactaagttctgaactaagacaggtgactaaaccagagaaggagaagctagatgatgtggatgttcaggcaaccaccggagatggtcagtggacagtgggaacttcaccaactcaagaaaagaggatgcttccttcaggaatggcatcatcatctcagctcatccctgaagaaagtggagcagttggaaataacagagtggacccatggagagaagccaagactcacaactttccaggagaagcatctgaacacaatgatcctaagaacaaacacctggaaggagatgaacaaagtcaggaagtggctcaagatatacaaacaacagaagacaatgaaggccaacttaagacaaataagccaatggcaggatcaaaaaagaccagcagtcccacagagaggaagggacaagataaggagatctcccaggaaggagatgaaccagccagagagcaaagtgtttccaagataagagaccagtttggagaacaggaaggaaacttggcaacccaaagttcaccaccaaaagaagcaacacaaagaccatgtgaagatcaggaagttagaacagaaaaggaaaaacactctaatatacaagaaccacccctacaaagagaagatgagcccagttcacagcatgctgacctgccagaacaagctgctgccaggtcaccatctcagacacagaaatcaactgattccaaggatgtctgtagaatgtttgacactcaagaaccaggaaaggatgctgaccagacaccagctaaaacaaagaatttgggtgaacctgaggattatggcagaacatctgagacccaagaaaaagaatgtgaaacaaaggacctgccagtccaatatggtagcagaaatggttcagaaacatctgacatgagagatgaaaggaaagagaggagaggtcctgaggcccatggaacagcagggcagaaagaacgtgacagaaaaactcggccactagtcctggaaacccaaacacaggatgggaagtatcaggaactccaaggattatcaaaatcaaaagatgctgaaaaaggttctgagacacaatatctaagctcagaaggaggagatcagactcaccctgaacttgaaggaacagcagtctcaggagaagaggcagaacacaccaaagaaggcacagcagaagcatttgtgaacagcaaaaacgcacctgcagcagaaaggacactgggggcaagagaaagaacacaagatttagcaccacttgagaagcagtctgtaggagaaaatactagggtcaccaagactcatgaccaaccagttgaggaggaggatggttaccagggggaggaccctgagtcaccattcacacagagtgatgaggggtcttctgaaactcccaacagcctggcttcagaggaaggcaatagcagctcagagacaggtgaactgcctgtgcaaggggactcccagagtcaaggggaccaacatggagagtctgtgcaaggaggtcacaataataacccagatacccagaggcagggaacacctggtgagaaaaacagagctctggaggcagtggtaccagcagtcagaggagaggatgtacagctcacagaggaccaggaacagcctgccagaggagaacacaagaatcaaggcccagggaccaaaggcccaggtgcagctgtggagcccaatggacacccagaagcacaggaatccacagcaggagatgaaaatagaaagtccctggaaatagagatcacaggtgccctggatgaagacttcactgaccagctttccctaatgcagctccctggaaagggagatagcagaaatgaattaaaggtccaaggcccaagtagcaaagaagagaaaggaagagcaacagaggcccagaatactctgttagaaagtctagatgaggacaattcagcctccctcaagatacaacttgaaacaaaggaacctgtaacatcagaggaggaagatgaaagtccccaagagctggcaggagaaggtggtgaccaaaaaagtccagccaagaaagagcacaattcttcagtcccctggtcaagtcttgaaaagcagatgcagagagaccaagagccctgttctgtggagaggggtgcagtctattccagtccactataccagtacctacaggagaagatactgcagcaaacaaatgtaacccaagaggagcatcaaaagcaagttcagatagcccaggcatcaggcccagagctttgcagtgtatccctcaccagtgagatctcagattgttctgtctttttcaactacagccaagcatcacaaccatataccaggggacttccacttgatgagagtcctgctggtgcacaggaaacaccagctccccaggccttggaagataagcaaggagttctaactatagttagtccagtgacagtgagggacaatcaagagattcaaaagaacagtcagtatctacccatgaccagtctaaatatggtcataggcaataccgatccagcaaaagaggaaaacaaaaccctagtcatggtcaaacaggaagaagctccagatagtcagtatctcagcagggccaaataa

SEQ ID NO: 88 - DNA, 1731 bp, Homo sapiens
  CDS (785)..(1429)
gggtaaagatgaggacagaggaagtgggaggtagaaaccattatgatggcacaaggtagagaggaaggaaagccatggagttgtgagcagagcccaaagtagggagagagacagaggatggtatctgaggaccaccgggagctcaccattgtatttcataaaatgctttgcatacagtgagtactttatcagtatccttgaccatatgattaaaatagagtgcatgaataggctagatattgaggagggagttcgaaagaggaaaaaaggacaggaaatgggagatgtgcataaaacccccttgagggcaaaggccccagtctgggtggcagcgccctcaccggtgcacgatgctcttgctgtgcaggtaggcaatgcccagggtcagctgggagaaccacttgccagcaaggggctcagagcaggccccgtagcgctggatccattcaaggacatcaccaccctgagccagttccagaatgatgtatactcgagatgtgctctcaatggcccgatagaagttgatgaggtacttgtgccgcaagactttcattacctgtatttcacggggcaggaacttgttaagatagtcatcagaggccttcttctttgagatgatcttgactgccaccataaccttctgctttgtgtagaaagcctcatataccgacccataggagccatggccaatggccttgcccacctcataaccatattcatccatgagggaatggtaggctgtggtggttggtgctgcctctaagacatctcccttccccatgtaatgaaagtcttgcggcacaagtacctcatcaacttctatcgggccattgagagcacatctcgagtatacatcattctggaactggctcagggtggtgatgtccttgaatggatccagcgctacggggcctgctctgagccccttgctggcaagtggttctcccagctgaccctgggcattgcctacctgcacagcaagagcatcgtgcaccgggacttaaagttggagaacctgttgctggacaagtgggagaatgtgaagatatcagactttggctttgccaagatggtgccttctaaccagcctgtgggttgtagcccttcttaccgccaagtgaactgcttttcccacctcagccagacttactgtggcagctttgcttacgcttgcccagagatcttacgaggcttgccctacaaccctttcctgtctgacacctggagcatgggcgtcatcctttacactctagtggtcgcccatctgccctttgatgacaccaatctcaaaaagctgctaagagagactcagaaggaggtcactttcccagctaaccataccatctcccaggagtgcaaggtccaactgctcattgcctgtgtggcacaatggagaaaaactcaggcaagacctctctctcccctgctctagaacctgatcctccagatgctacgccaagccactaagcgtgccaccattctggacatcatcaaggattcctgggtgctcaagttccagcctgagcaacccacccatgagatcaggctgcttgaggccatgtgccagctccacaacaccactaaacagcaccaatccttgcaaattacgacctgaaaatggctgagggagggggctaagagaggagcaaagcaggaggtcttgggctaaaaatcttttttaccaaaaataaatttaagtctgatttagtttcatcaaaaaaaaaaaaaaaa

SEQ ID NO: 89 - DNA, 1656 bp, Homo sapiens
  CDS (785)..(1540)
gggtaaagatgaggacagaggaagtgggaggtagaaaccattatgatggcacaaggtagagaggaaggaaagccatggagttgtgagcagagcccaaagtagggagagagacagaggatggtatctgaggaccaccgggagctcaccattgtatttcataaaatgctttgcatacagtgagtactttatcagtatccttgaccatatgattaaaatagagtgcatgaataggctagatattgaggagggagttcgaaagaggaaaaaaggacaggaaatgggagatgtgcataaaacccccttgagggcaaaggccccagtctgggtggcagcgccctcaccggtgcacgatgctcttgctgtgcaggtaggcaatgcccagggtcagctgggagaaccacttgccagcaaggggctcagagcaggccccgtagcgctggatccattcaaggacatcaccaccctgagccagttccagaatgatgtatactcgagatgtgctctcaatggcccgatagaagttgatgaggtacttgtgccgcaagactttcattacctgtatttcacggggcaggaacttgttaagatagtcatcagaggccttcttctttgagatgatcttgactgccaccataaccttctgctttgtgtagaaagcctcatataccgacccataggagccatggccaatggccttgcccacctcataaccatattcatccatgagggaatggtaggctgtggtggttggtgctgcctctaagacatctcccttccccatgtaatgaaagtcttgcggcacaagtacctcatcaacttctatcgggccattgagagcacatctcgagtatacatcattctggaactggctcagggtggtgatgtccttgaatggatccagcgctacggggcctgctctgagccccttgctggcaagtggttctcccagctgaccctgggcattgcctacctgcacagcaagagcatcgtgcaccgggacttaaagttggagaacctgttgctggacaagtgggagaatgtgaagatatcagactttggctttgccaagatggtgccttctaaccagcctgtgggttgtagcccttcttaccgccaagtgaactgcttttcccacctcagccagacttactgtggcagctttgcttacgcttgcccagagatcttacgaggcttgccctacaaccctttcctgtctgacacctggagcatgggcgtcatcctttacactctagtggtcgcccatctgccctttgatgacaccaatctcaaaaagctgctaagagagactcagaaggaggtcactttcccagctaaccataccatctcccaggagtgcaagaacctgatcctccagatgctacgccaagccactaagcgtgccaccattctggacatcatcaaggattcctgggtgctcaagttccagcctgagcaacccacccatgagatcaggctgcttgaggccatgtgccagctccacaacaccactaaacagcaccaatccttgcaaattacgacctgaaaatggctgagggagggggctaagagaggagcaaagcaggaggtcttgggctaaaaatcttttttaccaaaaataaatttaagtctgatttagtttcatcaaaaaaaaaaaaa

SEQ ID NO: 90 - DNA, 4861 bp, Homo sapiens
  CDS (364)..(4497)
cgattaaaagttgagttcaattttatttcacttgtaaacattcagcttaaaatttgcattctatactgaattaataattatgtaccatgattttcttccatgtatgacttacatctaaagtaagttttacttttcttgttctaggaacgtttggaaattgctagtttgtcaaaccaagatcatacctctaagaaggacccaggaggacacagaacggctgccattctacatggaggctctcctgactttgtaggaaatggtaaacatcgggcaaactcctcaggaaggtctaggcgagaacgtcagtattctgtatgtaatagtgaagattctcctggctcttgtgaaattctgtatttcaatatggggagtcctgatcagctcatggtgcacaaagggaaatgtattggcagtgatgaacaacttggaaaattagtctacaatgctttggaaacagccactggtggctttgtcttgttgtatgagtgggtccttcagtggcagaaaaaaatgggtccattccttaccagtcaagaaaaagagaagattgataagtgcaaaaagcagattcaaggaacagaaacagaattcaactcactggtaaaattgagccatccaaatgtagtacgctaccttgcaatgaatctcaaagagcaagacgactccatcgtggtggacattttagtggagcacattagtggggtctctcttgctgcacacctgagccactcaggccccatccctgtgcatcagcttcgcaggtacacagctcagctcctgtcaggccttgattatctgcacagcaattctgtggtgcataaggtcctgagtgcatctaatgtcttggtggatgcagaaggcaccgtcaagattacggactatagcatttctaagcgcctcgcagacatttgcaaggaggatgtgtttgagcaaacccgagttcgttttagtgacaatgctctgccttataaaacggggaagaaaggagatgtttggcgtcttggccttctgctgctgtccctcagccaaggacaggaatgtggagagtaccctgtgaccatccctagtgacttaccagctgactttcaagattttctaaagaaatgtgtgtgcttggatgacaaggaaagatggagtccccagcagttgttgaaacacagctttataaatccccagccaaaaatgcctctagtggaacaaagtcctgaagattctggaggacaagattatgttgagactgttattcctagcaaccggctacccagtgctgccttctttagtgagacacagagacagttttcccgatacttcattgagtttgaagaattacaacttcttggtaaaggagcttttggagctgtcatcaaggtgcagaacaagttggacggctgctgctacgcagtgaagcgcatccccatcaacccggccagccggcagttccgcaggatcaagggcgaagtgacactgctgtcacggctgcaccatgagaacattgtgcgctactacaacgcctggatcgagcggcacgagcggccggcgggaccggggacgccgcccccggactccgggcccctggccaaggatgaccgagctgcacgcgggcagccggcgagcgacacagacggcctggacagcgtagaggccgccgcgccgccacccatcctcagcagctcggtggagtggagcacttcgggcgagcgctcggccagtgcccgtttccccgccaccggcccgggctccagcgatgacgaggacgacgacgaggacgagcacggtggcgtcttctcccagtccttcctgcctgcttcagattctgaaagtgatattatctttgacaatgaagatgagaacagtaaaagtcagaatcaggatgaagattgcaatgaaaagaatggctgccatgaaagtgagccatcagtgacgactgaggctgtgcactacctatacatccagatggagtactgtgagaagagcactttacgagacaccattgaccagggactgtatcgagacaccgtcagactctggaggctttttcgagagattctggatggattagcttatatccatgagaaaggaatgattcaccgggatttgaagcctgtcaacatttttttggattttgatgaccatgtgaaaataggtgattttggtttggcgacagaccatctagccttttctgctgacagcaaacaagacgatcagacaggagacttgattaagtcagacccttcaggtcacttaactgggatggttggcactgctctctatgtaagcccagaggtccaaggaagcaccaaatctgcatacaaccagaaagtggatctcttcagcctgggaattatcttctttgagatgtcctatcaccccatggtcacggcttcagaaaggatctttgttctcaaccaactcagagatcccacttcgcctaagtttccagaagactttgacgatggagagcatgcaaagcagaaatcagtcatctcctggctgttgaaccacgatccagcaaaacggcccacagccacagaactgctcaagagtgagctgctgcccccaccccagatggaggagtcagagctgcatgaagtgctgcaccacacgctgaccaacgtggatgggaaggcctaccgcaccatgatggcccagatcttctcgcagcgcatctcccctgccatcgattacacctatgacagcgacatactgaagggcaacttctcaatccgtacagccaagatgcagcagcatgtgtgtgaaaccatcatccgcatctttaaaagacatggagctgttcagttgtgtactccactactgcttccccgaaacagacaaatatatgagcacaacgaagctgccctattcatggaccacagcgggatgctggtgatgcttccttttgacctgcggatcccttttgcaagatatgtggcaagaaataatatattgaatttaaaacgatactgcatagaacgtgtgttcaggccgcgcaagttagatcgatttcatcccaaagaacttctggagtgtgcatttgatattgtcacttctaccaccaacagctttctgcccactgctgaaattatctacactatctatgaaatcatccaagagtttccagcacttcaggaaagaaattacagtatttatttgaaccataccatgttattgaaagcaatactcttacactgtgggatcccagaagataaactcagtcaagtctacattattctgtatgatgctgtgacagagaagctgacgaggagagaagtggaagctaaattttgtaatctgtctttgtcttctaatagtctgtgtcgactctacaagtttattgaacagaagggagatttgcaagatcttatgccaacaataaattcattaataaaacagaaaacaggtattgcacagttggtgaagtatggcttaaaagacctagaggaggttgttggactgttgaagaaactcggcatcaagttacaggtcttgatcaatttgggcttggtttacaaggtgcagcagcacaatggaatcatcttccagtttgtggctttcatcaaacgaaggcaaagggctgtacctgaaatcctcgcagctggaggcagatatgacctgctgattccccagtttagagggccacaagctctggggccagttcccactgccattggggtcagcatagctatagacaagatatctgctgctgtcctcaacatggaggaatctgttacaataagctcttgtgacctcctggttgtaagtgttggtcagatgtctatgtccagggccatcaacctaacccagaaactctggacagcaggcatcacagcagaaatcatgtacgactggtcacagtcccaagaggaattacaagagtactgcagacatcatgaaatcacctatgtggcccttgtctcggataaagaaggaagccatgtcaaggttaagtctttcgagaaggaaaggcagacagagaagcgtgtgctggagactgaacttgtggaccatgtactgcagaaactgaggactaaagtcactgatgaaaggaatggcagagaagcttccgataatcttgcagtgcaaaatctgaaggggtcattttctaatgcttcaggtttgtttgaaatccatggagcaacagtggttcccattgtgagtgtgctagccccggagaagctgtcagccagcactaggaggcgctatgaaactcaggtacaaactcgacttcagacctcccttgccaacttacatcagaaaagcagtgaaattgaaattctggctgtggatctacccaaagaaacaatattacagtttttatcattagagtgggatgctgatgaacaggcatttaacacaactgtgaagcagctgctgtcacgcctgccaaagcaaagatacctcaaattagtctgtgatgaaatttataacatcaaagtagaaaaaaaggtgtctgtgctatttctgtacagctatagagatgactactacagaatcttattttaaccctaaagaactgtcgttaacctcattcaaacagacagaggcttatactggaataatggaatgttgtacattcatcataatttaaaattaaattctaagaagaggtgggtgcagtggtcacactttatccagcatttggagccagcaggagatggtgaacagggttggacagctgagaaaaggagacctttttaaataaaattgtgggtgggggcatgcggggtcagactccagggaaggggatgagcaggggagggggggaggaggacgcctggaaaaggactttaaaagaaattaggagggggggggaaaaatggaagtcaaagaggggccattataggatgtagattgttttgaattg

SEQ ID NO: 91 - DNA, 5799 bp, Homo sapiens
  CDS (609)..(5282)
ttcgagcctgtggaaggctgcgctgtcaagagaccggagttgcgagcgtctgggtgacgtccgtcctcctggaaggtgggatccgggtggcaggtcccctgggcggcgactccggccgggctcatagcgtcgcgcccgccccgctcatcggccctacccagcgtccctcccagaccgacgaccgcctgggaagcctcgagctcccagcccgctgcacagcccggctccgctccacagtcccccactgccaccggccggggcgacaccgggcgagctggcgagacccggctccaggaccgaatcgcgccgacacttgacggcgctccccggcccctccctgccgccgtctccgcccccgtccggtcgcattccggcgcccgccgccgccgccgccaccgccgccgatctgggaggcttgtccctcgccgcccaccgtagccccggcgctcggccggtcgccgtttccaagatggccgcggcgcgcacggctcctgcggcggggtagaggcggaggcggagtcgagtcactcccgcacttcggggctccggtgccccgcgccaggctgcagcttactgcccgccgcggccatgcggggctccgtgcacggatgagagaagccgctgccgcgctggtccctcctcccgcctttgccgtcacgcctgccgccgccatggaggagccgccgccaccgccgccgccgccaccaccgccaccggaacccgagaccgagtcagaacccgagtgctgcttggcggcgaggcaagagggcacattgggagattcagcttgcaagagtcctgaatctgatctagaagacttctccgatgaaacaaatacagagaatctttatggtacctctccccccagcacacctcgacagatgaaacgcatgtcaaccaaacatcagaggaataatgtggggaggccagccagtcggtctaatttgaaagaaaaaatgaatgcaccaaatcagcctccacataaagacactggaaaaacagtggagaatgtggaagaatacagctataagcaggagaaaaagatccgagcagctcttagaacaacagagcgtgatcataaaaaaaatgtacagtgctcattcatgttagactcagtgggtggatctttgccaaaaaaatcaattccagatgtggatctcaataagccttacctcagccttggctgtagcaatgctaagcttccagtatctgtgcccatgcctatagccagacctgcacgccagacttctaggactgactgtccagcagatcgtttaaagttttttgaaactttacgacttttgctaaagcttacctcagtctcaaagaaaaaagacagggagcaaagaggacaagaaaatacgtctggtttctggcttaaccgatctaacgaactgatctggttagagctacaagcctggcatgcaggacggacaattaacgaccaggacttctttttatatacagcccgtcaagccatcccagatattattaatgaaatccttactttcaaagtcgactatgggagcttcgcctttgttagagatagagctggttttaatggtacttcagtagaagggcagtgcaaagccactcctggaacaaagattgtaggttactcaacacatcatgagcatctccaacgccagagggtctcatttgagcaggtaaaacggataatggagctgctagagtacatagaagcactttatccatcattgcaggctcttcagaaggactatgaaaaatatgctgcaaaagacttccaggacagggtgcaggcactctgtttgtggttaaacatcacaaaagacttaaatcagaaattaaggattatgggcactgttttgggcatcaagaatttatcagacattggctggccagtgtttgaaatcccttcccctcgaccatccaaaggtaatgagccggagtatgagggtgatgacacagaaggagaattaaaggagttggaaagtagtacggatgagagtgaagaagaacaaatctctgatcctagggtaccggaaatcagacagcccatagataacagcttcgacatccagtcgcgggactgcatatccaagaagcttgagaggctcgaatctgaggatgattctcttggctggggagcaccagactggagcacagaagcaggctttagtagacattgtctgacttctatttatagaccatttgtagacaaagcactgaagcagatggggttaagaaagttaattttaagacttcacaagctaatggatggttccttgcaaagggcacgtatagcattggtaaagaacgatcgtccagtggagttttctgaatttccagatcccatgtggggttcagattatgtgcagttgtcaaggacaccaccttcatctgaggagaaatgcagtgctgtgtcgtgggaggagctgaaggccatggatttaccttcattcgaacctgccttcctagttctctgccgagtccttctgaatgtcatacatgagtgtctgaagttaagattggagcagagacctgctggagaaccatctctcttgagtattaagcagctggtgagagagtgtaaggaggtcctgaagggcggcctgctgatgaagcagtactaccagttcatgctgcaggaggttctggaggacttggagaagcccgactgcaacattgacgcttttgaagaggatctacataaaatgcttatggtgtattttgattacatgagaagctggatccaaatgctacagcaattacctcaagcatcgcatagtttaaaaaatctgttagaagaagaatggaatttcaccaaagaaataactcattacatacggggaggagaagcacaggccgggaagcttttctgtgacattgcaggaatgctgctgaaatctacaggaagttttttagaatttggcttacaggagagctgtgctgaattttggactagtgcggatgacagcagtgcttccgacgaaatcaggaggtctgttatagagatcagtcgagccctgaaggagctcttccatgaagccagagaaagggcttccaaagcacttggatttgctaaaatgttgagaaaggacctggaaatagcagcagaattcaggctttcagccccagttagagacctcctggatgttctgaaatcaaaacagtatgtcaaggtgcaaattcctgggttagaaaacttgcaaatgtttgttccagacactcttgctgaggagaagagtattattttgcagttactcaatgcagctgcaggaaaggactgttcaaaagattcagatgacgtactcatcgatgcctatctgcttctgaccaagcacggtgatcgagcccgtgattcagaggacagctggggcacctgggaggcacagcctgtcaaagtcgtgcctcaggtggagactgttgacaccctgagaagcatgcaggtggataatcttttactagttgtcatgcagtctgcgcatctcacaattcagagaaaagctttccagcagtccattgagggacttatgactctgtgccaggagcagacatccagtcagccggtcatcgccaaagctttgcagcagctgaagaatgatgcattggagctatgcaacaggataagcaatgccattgaccgcgtggaccacatgttcacatcagaatttgatgctgaggttgatgaatctgaatctgtcaccttgcaacagtactaccgagaagcaatgattcaggggtacaattttggatttgagtatcataaagaagttgttcgtttgatgtctggggagtttagacagaagataggagacaaatatataagctttgcccggaagtggatgaattatgtcctgactaaatgtgagagtggtagaggtacaagacccaggtgggcgactcaaggatttgattttctacaagcaattgaacctgcctttatttcagctttaccagaagatgacttcttgagtttacaagccttgatgaatgaatgcattggccatgtcataggaaaaccacacagtcctgttacaggtttgtaccttgccattcatcggaacagcccccgtcctatgaaggtacctcgatgccatagtgaccctcctaacccacacctcattatccccactccagagggattcaggggttccagcgttcctgaaaatgatcgattggcttccatagctgctgaattgcagtttaggtccctgagtcgtcactcaagccccacggaggagcgagatgaaccagcatatccaagaggagattcaagtgggtccacaagaagaagttgggaacttcggacactaatcagccagagtaaagatactgcttctaaactaggacccatagaagctatccagaagtcagtccgattgtttgaagaaaagaggtaccgagaaatgaggagaaagaatatcattggtcaagtttgtgatacgcctaagtcctatgataatgttatgcacgttggcttgaggaaggtgaccttcaaatggcaaagaggaaacaaaattggagaaggccagtatgggaaggtgtacacctgcatcagcgtcgacaccggggagctgatggccatgaaagagattcgatttcaacctaatgaccataagactatcaaggaaactgcagacgaattgaaaatattcgaaggcatcaaacaccccaatctggttcggtattttggtgtggagctccatagagaagaaatgtacatcttcatggagtactgcgatgaggggactttagaagaggtgtcaaggctgggacttcaggaacatgtgattaggctgtattcaaagcagatcaccattgcgatcaacgtcctccatgagcatggcatagtccaccgtgacattaaaggtgccaatatcttccttacctcatctggattaatcaaactgggagattttggatgttcagtaaagctcaaaaacaatgcccagaccatgcctggtgaagtgaacagcaccctggggacagcagcatacatggcacctgaagtcatcactcgtgccaaaggagagggccatgggcgtgcggccgacatctggagtctggggtgtgttgtcatagagatggtgactggcaagaggccttggcatgagtatgagcacaactttcaaattatgtataaagtggggatgggacataagccaccaatccctgaaagattaagccctgaaggaaaggacttcctttctcactgccttgagagtgacccaaagatgagatggaccgccagccagctcctcgaccattcgtttgtcaaggtttgcacagatgaagaatgaagcctagtagaatatggacttggaaaattctcttaatcactactgtatgtaatatttacataaagactgtgctgagaagcagtataagcctttttaaccttccaagactgaagactgcacaggtgacaagcgtcacttctcctgctgctcctgtttgtctgatgtggcaaaaggccctctggagggctggtggccacgaggttaaagaagctgcatgttaagtgccattactactgtacacggaccatcgcctctgtctcctccgtgtctcgcgcgactgagaaccgtgacatcagcgtagtgttttgacctttctaggttcaaaagaagttgtagtgttatcaggcgtcccataccttgtttttaatctcctgtttgttgagtgcactgactgtgaaacctttaccttttttgttgttgttggcaagctgcaggtttgtaatgcaaaaggctgattactgaaatttaagaaaaaggttcttttttcaataaatggtttattttaggaaagctc

SEQ ID NO: 92 - DNA, 2158 bp, Homo sapiens
  CDS (462)..(1760)
agggcacaggcagctcaggacaaggccccagacagctcccaaatctctgcccccacccctgccctcaggcccacaacaggcacagtgcacatcatggatcctggttgcctgtactatggtgtccaacctgtggggactccaggagcccccgacagaagagagagcagaggtgtttgtcagggcagggctgaacacaggcccccacaaggctcagcagacaggatctggaggcacgggaggatgctggctatgccagccttgagctacctggagactccaccctcttatcgcccaccctggaaacagaggagaccagtgatgacctcatttcaccctatgccagcttctccttcacggcagaccgcctcacgcccctgctcagtggctggctagacaagctctcccctcagggaaactatgtcttccagagacgctttgtgcagttcaatgggaggagtctgatgtactttggcagtgacaaggaccccttccctaagggtgtgatacctttgactgccattgagatgacccgcagcagcaaggacaacaagttccaggtcatcaccggccagagggtgttcgtgttccgcacagagagcgaggctcagcgggacatgtggtgctccacgctgcagtcctgtctgaaggagcagcgcctcctgggccacccccggcccccccaaccaccccgacccctccgcacgggcatgctggagctgcgtggacacaaggccaaggtgtttgctgccttgagccctggagagctggcactgtacaagagtgagcaggccttctctctgggcatcgggatctgcttcatcgaactgcagggctgcagcgtccgggagaccaagagtcgaagctttgacctgctcacaccccatcgctgcttcagcttcacagccgagtctgggggtgctcggcagagctgggcggccgctctgcaggaagcagtaaccgagaccctgtctgactacgaggtggctgagaagatctggtctaatcgggccaaccggcagtgtgcggactgtgggtcctcccgcccagattgggctgctgtcaatttgggggtggtcatctgcaagcagtgtgcaggtcagcaccgggccctgggttctgggatctccaaggtgcagagcctgaagctggacacgagtgtctggagtaatgagatagtacagttattcattgtcctgggaaatgatcgtgccaaccgcttctgggcagggaccctacccccaggtgagggactacatccagatgcgacccctggcccccggggagagttcatctcccgaaagtaccgtctgggtctcttccggaagccccaccctcagtacccagatcatagccagcttctccaggcactgtgtgcagctgtggcaagacccaacctgctgaagaacatgacccagctcctctgtgttgaggcctttgaaggcgaggagccctggttccccccagcccctgatggcagctgccctggcctcttgccctcagacccctcccctggtgtgtacaatgaggtggtggtgcgtgctacttacagcggcttcctgtactgcagtcccgtcagcaacaaagctggaccctcaccccctcgcaggggccgggatgctcccccgcgcctttggtgtgtgctgggagcagctctggaaatgtttgcatcggaaaacagccctgaacccctcagcctcatacagccccaggatattgtatgtctgggtgtgagccccccacccactgacccaggtgacaggtaatagcccttctgtgaccactgagcttcccccttttctcttcccaacctccagcctgacagccctctcattggtcccatcctcctccctgacctcatcttctctccaggttccccttttcctttgagctcatcctcgctggggggaggatccagcattttggcacagatggagctgacagtctggaggcctggactagtgctgtgggcaaggtgagacaggagagcgccctctgcagcatctcatgctttccttgtccccacgtgctcccatcttctcctctcttattcctacagccgcttcttccactaacagataagggagactgagcacatattctgtgccaggccctgtgttaagcgttcgaaatcgtcgaaccgggaattccggggcggtac

SEQ ID NO: 93 - DNA, 3322 bp, Homo sapiens
  CDS (714)..(3005)
aaaaaagaaaatgggggtaatgaccaccgctaccgggtggggtggctgggaggagtgatgtggtaatatatgcaaagcacttagaatagaacctggcacccatttaccgtgtgaactgtcccccccgccccatccttctctaacgggcggaggacaggagcctggcctagatgagtggcctcggagtttccatctggctcaggcctgagctctaaggggagagaggcttccaaaaccctgtgcgagtcagtcctgggtgccgtcccttccttcgcctccatctgcagtgagcaaaggctgctggtggccgctgcaccccatggctgttctccaccctctgctttccaccggctctgcagcctgggccgagccagtggcccccagaggatgagaaggaggtgatccgccgggccatccagaaagagctgaagatcaaggagggggtggagaacctgcggcgcgtggccacagaccgccgccacttgggccatgtgcagcagctgctgcggtcctccaaccgccgcctggagcagctgcatggcgagctgtgggagctgcacgcccgaatcctgctgcccggccctgggcctggcccagctgagcctgtggcctcaggaccccggccgtgggcagagcagctcagggctcggcacctagaggctctccggaggcagctgcatgtggagctgaaggtgaagcagggggctgagaacatgacccacacgtgcgccagtggcacccccaaggagaggaagctcctggcagctgcccagcagatgctgcgggacagccagctgaaggtggccctgctgcggatgaagatcagcagcctggaggccagtgggtccccggagccagggcctgagctgctggcggaggagctacagcatcgactgcacgttgaggcagctgtggctgagggcgccaagaacgtggtgaaactgcttagtagccggagaacacaggaccgcaaggcactggctgaggcccaggcccagctacaggagtcctctcagaaactggacctcctgcgcctggccttggagcagctgctggagcaactgcctcctgcccaccctttgcgcagcagagtgacccgagagttgcgggctgcggtgcctggatacccccagccttcagggacacctgtgaagcccaccgccctaacagggacactgcaggtccgcctcctgggctgtgaacagttgctgacagccgtgcctgggcgctccccagcggccgcactggccagcagcccctccgagggctggcttcggaccaaggccaagcaccagcgtggccgaggcgagcttgccagtgaggtgctggctgtgctaaaggtggacaaccgtgttgtggggcagacgggctgggggcaggtggccgaacagtcctgggaccagacctttgtcatcccactggagcgagcccgtgagctggagattggggtacactggcgggactggcggcagctatgtggcgtggccttcctgagacttgaagacttcctggacaatgcctgtcaccaactgtccctcagcctggtaccgcagggactgctttttgcccaggtgaccttctgcgatcctgtcattgagaggcggccccggctgcagaggcaggaacgcatcttctctaaacgcagaggccaggacttcctgaggcgttcgcagatgaacctcggcatggcggcctgggggcgcctcgtcatgaacctgctgcccccctgcagctccccgagcacaatcagcccccctaaaggatgccctcggaccccaacaacactgcgagaggcctctgaccctgccactcccagtaatttcctgcccaagaagacccccttgggtgaagagatgacacccccagcccaagcccccacggcctctacctcccccagggagccaacatccgaggagactccgcgcaccaaacgtccccatatggagcctaggactcgacgtgggccatctccaccagcctcccccaccaggaaaccccctcggcttcaggacttccgctgcttagctgtgctgggccggggacactttgggaaggtcctcctggtccagttcaaggggacagggaaatactacgccatcaaagcactgaagaagcaggaggtgctcagccgggacgagatagagagcctgtactgcgagaagcggatcctggaggctgtgggctgcacagggcaccctttcctgctctccctccttgcctgcttccagacctccagccatgcctgctttgtgactgagtttgtgcctggtggtgaccccatgatgcagatccacgaggatgtcttccccgagccccaggcccgcttctacgtggcttgtgttgtcctggggctgcagttcttacacgagaagaagatcatttacagggacctgaagttggataaccttctgctggatgcccagggattcctgaagatcgcagactttggactctgcaaggaagggatcggcttcggggaccggactagcaccttctgtggcaccccggagttcctggctcccgaggtgctgacccaggaggcatacacacgggctgtggactggtgggggctgggtgtgctgctctacgagatgctggtgggtgagtgcccgttcccaggggacacagaggaagaggtgtttgactgcatcgtcaacatggacgccccctaccccggctttctgtcggtgcaagggcttgagttcattcagaagctcctccagaagtgcccggagaagcgcctcggggcaggtgagcaggatgccgaggagatcaaggtccagccattcttcaggaccaccaactggcaagccctgctcgcccgcaccatccagccccccttcgtgcctaccctgtgtggccctgcggacctgcgctactttgagggcgagttcacagggctgccgcctgccctgaccccacctgcaccccacagcctcctcactgcccgccaacaggccgccttccgggacttcgactttgtgtcagagcgattcctggaaccctgagggcatctcctggcacctctgtccccttcccccacagactgttagagcctctgctcgttcacccgtgcgccctgcctggaggtccaggccttgctgggtacttctgagcccttgggattcaaagtggcagccatggggccactgttgtgggctttgctcagtgtcactgggcaaagtgtgtcccttccccctccagctcgccctcttctacctcccagcgagacctggcccagaaagggtgccgcagcaaggagtgatatggtttgtctttttaagactggacttgctttatattaaatttgtaaaagtgaaaa

SEQ ID NO: 94 - DNA, 3007 bp, Homo sapiens
  CDS (610)..(2622)
ccggaatttccgggtcgaggaccgtgtaccctaccctagccaccctctttccagggcatggtcctgaggccgcatggaggccgctactcagctcttctagcctggggtgggtgaggacatgggctgggagggacacggctcagaggcactcggcccccatgaggaacctgtccctggggaaggatctggtcgaccgtgcggcgcagggcagggcctacggcaacctgggcaacacccactatttgttggggaactttacagaggccacgaccttccacaaggagcgcctggccattgctaaggagtttggagacaaggcagccgagaggagggcctacagcaacctggggaacgcccacgtcttcctggggctgctttgacgtggcctgccgagtactacaagaagacgctgcaactgtctcggcagctcagggaccaggcagtggaggcgcaggcctgctacagtctgggcaagcacctacacgctgctgcaggactacgagcgcgcggccgagtaccacctggcggcacctgctcattgcccaggagctggccgacagagtgggcgagggccgggcgtgctggagcctgggaaatgcctacgtgtccatggggcgcccagcgcaggccctgaccttcgccaagaagcacctgcagatctcccaggagatcggggaccgccatggggagctcacggcccgcatgaacgtggcgcagctgcagctggtgctcggccgcctgaccagcccggcagcctcagagaagcctgacctggccggctatgaggcccagggggccagacccaagaggacgcagaggctgagcgcggagacctgggacctgctgagactccccctggagcgggagcagaatggagacagccaccattcaggggactggcgggggcccagcagggactcgctacccctccccgtgaggagcaggaagtaccaggaaggcccggacgctgagaggaggccccgggagggcagccactccccgctggacagcgccgacgtccgggtgcacgtgccacgcacgagcatcccgagggccccgtcttcggacgaggagtgcttctttgacctgttgaccaagttccagagcagccgcatggacgaccagcgttgtcccctggacgatggccaggccggggctgccgaggccacggccgcccccaccctggaggacaggatcgcccagccctcgatgacggcctcgccccagaccgaggaattcttcgacctcatcgccagctcccagagccgccggctggacgaccagcgggccagcgtgggcagcctgccggggctgcgaatcacccacagcaatgcagggcacctccgaggccacggcgagccccaggagccgggggacgacttcttcaacatgctcatcaagtaccagtcctccaggatcgatgaccagcgctgcccaccacctgacgtactgccccggggccctaccatgccggacgaggacttcttcagcctcattcagagggtgcaggctaagcgcatggacgagcagcgggtggacctcgccggggggcccggagcagggggcaggcggcccgcccgagccccagcagcagtgccagcctggtgcgagctaaggccttgtgcccaccgccaggcccaccctgcccccactcctggacgccggtctcacagtcacagccacgtcctcccgaggccattgccgaggacaggcactgggcatgcagccccacggcctccccgacccagggcgacaggctcaggccaagctgcccgtggtgggagggcgtgcttccatcccgggctggcccccatggccctcagcttcctcccttctgcccctgccgcaggccggacggggccttcggcatgtcggccccgacctggtgctgtcagactcccgcatcctctcccccaagcccttcccgttctgccctgccctgccaaatgtgaaaccctgctgtctcccccaccctccccaaaggtgtctctgagccgcctcttggggccaccaaggacagggccatgttctgtccccccagagctggtcttgggatggccgtgtgacaggcatgctccacccctccagcttcgtcctggggcagggctccctccaagcctgtctccccactccccggccagaggtcagcaaccacagaaggccccccagaccacgcatggcagaccaggctgcagtggcagccctgaggtgccccccgccgagtcccagggccctgcaggggcctcgacaggagccgggcctatctctaaagcagagggaatggctgggcatgaacttcgacattccaaaaccccaagccaggaaaaagggcagggcctggtcctagggatgcttactggcagcaagagcagtgcccagtcagggtgggaggtagcaccaggctctgtgaccctcacccaagtgggggggtggtcagtggaagctggggaggcttcactcagctcaaccctgcagaccccccatatgagaacccccctcctcccaccagctgggggagatgacatcactgctctctccatggggagggggctcacagggcaccaagttcgggatcctaggactggcaggacctgctggagcctgagatgggccccaggggcctgaggttgcctcctcctgtccagacccagccttggcacctcccaagactgccaagggccctaccatggccccacagcccccagggctggcagttccatctaggagggtgcctctaggccccactctcaggctaggatggagaggcagatctgggcctggtgaggtgacctgcttctggaggggcagggccgcacccgagagcagggacaggtgcccgaacacagggtctccaggacgtagcgcccccccgcatacttgaatgtatgtgcgtatttattgctcacgtctgtgccatgttgtcaatgggtcctttccaacccaagaggtacatttgtttttctgtttttcctgaaaaataaagtcggccaagtgagaaaaaaaaaaa

SEQ ID NO: 95 - DNA, 2422 bp, Homo sapiens
  CDS (373)..(1857)
atggcaaacagcgagcagctgcgagggctccggctggaaggtgtataccggaaagggggcgctcgtgcccgcagcctgagactcctggctgagttccgtcgggatgcccggtcggtgaagctccgaccaggggagcactttgtggaggatgtcactgacacactcaaacgcttctttcgtgagctcgatgaccctgtgacctctgcacggttgctgcctcgctggagggaggctgctgagctgccccagaagaatcagcgcctggagaaatataaagatgtgattggctgcctgccgcgggtcaaccgccgcacactggccaccctcattgggcatctctatcgggtgcagaaatgtgcggctctaaaccagatgtgcacgcggaacttggctctgctgtttgcacccagcgtgttccagacggatgggcgaggggagcacgaggtgcgagtgctgcaagagctcattgatggctacatctctgtctttgatatcgattctgaccaggtagctcagattgacttggaggtcagtcttatcaccacctggaaggacgtgcagctgtctcaggctggagacctcatcatggaagtttatatagagcagcagctcccagacaactgtgtcaccctgaaggtgtccccaaccctgactgctgaggagctgactaaccaggtactggagatgcgggggacagcagctgggatggacttgtgggtgacttttgagattcgcgagcatggggagctggagcggccactgcatcccaaggaaaaggtcttagagcaggctttacaatggtgccagctcccagagccctgctcagcttccctgctcttgaaaaaagtccccctggcccaagctggctgcctcttcacaggtatccgacgtgagagcccacgggtggggctgttgcggtgtcgtgaggagccacctcgcttgctgggaagccgcttccaggagaggttctttctgctgcgtggccgctgcctgctgctgctcaaggagaagaaaagctctaaaccagaacgggagtggcctttggaaggtgccaaggtctacctgggaatccgcaagaagttaaagcccccaacaccgtggggcttcacattgatactagagaagatgcacctctacttgtcctgcactgacgaggatgaaatgtgggattggaccaccagcatccttaaagcccagcacgatgaccagcagccagtggtcttacgacgccattcctcctctgaccttgcccgtcagaagtttggcactatgcctttgctgcctatccgtggggatgacagtggagccaccctcctctctgccaatcagaccctgcggcgactacacaaccggaggaccctgtccatgttctttccaatgaagtcatcccaggggtctgtggaggagcaagaggagctggaggagcctgtgtacgaggagccagtgtatgaggaagtaggggccttccctgagttgatccaggacacttctacctccttctccaccacacgggagtggacagtgaagccagagaaccccctcaccagccagaagtcattggatcaaccctttctctccaagtcaagcacccttggccaggaggagaggccacctgagccccctccaggccccccttcaaagagcagtccccaggcacgggggtccctagaggaacagctgctccaggagctcagcagcctcatcctgaggaaaggagagaccactgcaggcctgggaagtccttcccagccatccagcccccaatcccccagccccactggccttccaacacagacacctggcttccccacccaacccccatgcacttccagtccaccctccagccagcccctcacatgaccctaggaccagcagtctgagagggtaggtaccagaagacccagaaactcttatcgtggcactgttgcagcttcctctgccctggctggaaagactccagaatccagtgtggtgctgtggaaggagcactggactaaaggcttcagtggctgcgtgtcccaggacaggtcatggcccctctctgggcccagcccatttatctataccatgaggtaactgaagtaaggagagcagtgaatgtcaaactgtgtttcttagagccataagccccacatattatccctgaacaagggcagctcctgctttatatatttgatacgtaggggttccatgagagattttgggttttaaaggaatggttttactgcattaaagaaaaaaaatgctttggaaaccagaggcctgggtgatgttaaagtctatcctgtcccacttcctacattctgggactaccgtgaagcctggagtagggagagcgagtttgggagctgggactcggggagtcaaaaatagatgagtaattgtcaataaacctgggaaccaaaagaaaaaaaaaaaaaaa

SEQ ID NO: 96 - DNA, 1622 bp, Homo sapiens
  CDS (68)..(1174)
attaacagctcctggggctctaggatcgctgatcgcgtcgggggcactgcaagcgcccagctgagccatgctctgggaggagacaggcgccgcccctgcgcccgcgcgggcctcggacctcccctacaggatatcctcagaccatctcaaaaaggaggaaaagatgactatgatggctcaccagtacccctcttggatcttcattaatgagaagacattcataaccagggaacaacttaattctttattgaagacctataacattttttatgagaaccagaaaaatctgcatattttatatggagagactgaagatggcaaactaattgttgaaggaatgctggacattttctggggagtaaaacgacctatacagctaaaaatacaagatgagaagccattctcttcttttactagtatgaagtcatcagacgtcttctccagcaaaggaatgacacgctggggggaatttgacgatctctatcgtattagtgagctggacaggacccagattcctatgtctgaaaaaaggaattcccaggaagactatttaccttatcacagcaacaccctgaagccacatgcaaaggatgaaccagactccccagtgctctatagaaccatgagtgaagcagctctggtgagaaaaaggatgaagcctctgatgatggacagaaaagaaagacagaaaaatagagcctctattaatggacacttctataaccatgaaacatcaattttcattccagcctttgaatcagaaactaaggtcagagtaaacagtaacatgagaactgaagaagtaataaagcaacttctccaaaaatttaagattgaaaatagtccccaggattttgctcttcacattatttttgcaacaggagaacaaagacgactaaagaagacagacattccgctactgcagaggctcctacagggaccttctgaaaagaatgctcgcattttcctcatggataaagatgcagaagaaattagcagtgatgtggctcagtacattaactttcacttttctctcttggaatccattcttcaaagattaaatgaagaagagaaaagagagattcaaagaatagtaacaaaattcaataaagaaaaggcgattatactgaaatgtcttcaaaataaactagtaataaaaacagagacaacagtttagcagtacaagcttctattgctaaaacatttcaaaaaactcagagatattactctttgatgaatgcataagttctgtacttgcatttatacgaacatatatgagacttgaatcgtagaaaattgaatgtcaaaaaaagctcatttctttttgaagtgatgaggttaattagggttcacagttgggacaaaatgagtttgagtttagtttcagtaactgaattaggccttgatactgcctatgcccaataggctttatagttaaccctgttatggactccaattttattggtttccttcgttggcccgtttaccttcttttgcttgggcttttagggggctcgtacctatccatgggtctcggattcctcgggtatggggtgcccgttctggggttgtatggattcggttctccctccgggtctccccgtggtccgtggtctttgacg

SEQ ID NO: 97 - DNA, 1422 bp, Homo sapiens
  CDS (97)..(1350)
agctggacgaggcttccgtggcttcgggcggggaggtcacaatcacattgagccaaaacgcatccagtgttttctccagttacaaataaaacgaatatgcccatgctgctaccacatcctcaccagcatttcctaaaaggccttttaagagcacctttccgatgttaccacttcatctttcactcaagtactcatctcggatcaggaatcccatgtgctcagccgtttaattctcttggactccattgtacaaagtggatgctgctgtcagatggcttaaagagaaaattatgtgtacaaacaaccttaaaggaccacacagaaggactttctgataaagagcaaagatttgtggataaactttatactggtttaatccaagggcaaagggcctgtttagcagaggccataactcttgtagaatcaactcacagcaggaaaaaggagttagcccaggtgcttcttcagaaagtattactttaccacagagaacaagaacaatcaaataaaggaaaaccactagcatttcgagtaggattgtctgggccccctggtgctggaaaatcaacatttatagaatattttggaaaaatgcttactgagagagggcacaaattatctgtgctagctgtggacccttcttcttgtactagtggtggatcactcttaggtgataaaacccgaatgactgagttatcaagagatatgaatgcatacatcaggccatctcctactagaggaactttaggaggcgtgacaaggaccacaaatgaagctattctgttgtgtgaaggagcgggatatgacataattcttattgaaaccgttggtgtgggtcagtcggagtttgctgttgctgacatggttgacatgtttgttttactactgccaccagcaggaggagatgagctgcagggtatcaaaaggggtataatcgagatggcagatctggtagctgtaactaaatctgatggagacttgattgtgccagctcgaaggatacaagcggaatatgtgagtgcactgaaattactccgcaaacgttcacaagtctggaaaccaaaggtaattcgtatttctgcccgaagtggagaggggatctctgaaatgtgggataaaatgaaagatttccaggacctaatgcttgccagtggggagctgactgccaaacgacggaagcaacagaaagtttggatgtggaatctcattcaggaaagtgtgttagagcatttcaggacccaccccacagtccgggaacagattccacttctggaacaaaaggttctcattggggccctgtccccaggactagcagcagacttcttgttaaaagcttttaaaagcagagactaataaaattcatcctgtataataattttacatatcatttcataaagtattttaataaaaaaaaaaaaaaaa

SEQ ID NO: 98 - DNA, 3090 bp, Homo sapiens
  CDS (790)..(2997)
gagcaggtgggcaggagggtctccgactccagagacctgagcttttggggcgcgggtgggagcgcgggggaaccctcaagacggctttcttttggcgactgagggtttttctgccacaggaagctgggccgggctgctgtgcctgggaggagggaaggaggaatgagaaagcggtgacggtccctgccccccctcgccaggtgactgtcccacccatttagttgaatgtagcggccagagaggcactcgcggcagcccgtacgggtgggacctctcggtgtccttcgggaaacaggaggagcaagttcgactccagcgagggaaaacggaggtgggagactgaaccatctccacatctagttgccccaggtttttggctttcatcgctttttctacatgtttttagcctcaccagaagtctttcatctcggtggtccaactcaggatctcagcctcattattttcttacccttctggagtgcatatgtgcctttacagtttctgtttgcaaacgctgtctagcatactaagaggatgttagcaaacctgttccatggacactaaatggcagttgtacatctcccctcatcagtcatagtgacaaccagaaatgccctccatattttccagtgatcccagtcttcaatgcgtctgtctcataatttgtaaacgtttattatcttgaagtcattgttaatctgtggtgaaaagtaattgctaaatagaaattctgagaagaaaaaggcctcatccttttcacatgatgtaggaaggtctgttgcatgagcaatgggaaatccagaaaacatagaagatgcatatgttgctgttattcgtccaaagaatactgccagtctcaattctcgggaatacagagctaagtcatatgaaattttgttgcatgaagttcccattgaaggacagaaaaaaaagagaaagaaagttttattggaaacgaaacttcaaggcaacagtgaaataacacaaggcatattggattacgtagtagaaaccaccaaaccaatttctcctgcaaaccagggtatcagaggaaaacgagttgtactaatgaaaaaatttcctctggatggagagaagatgggcagagaagcatcattatttattgttccatcagttgtcaaagataatactaaatacacatataccccaggatgcccaattttttactgcttacaagatattatgcgagtctgtagtgaatccagtactcattttgctacacttacagcaaggatgttaatagccttggataagtggttagatgaacgtcatgcacaatctcactttattccagctttattccgaccttctcctcttgagcggataaaaactaatgtcataaatcctgcatatgctactgaatcaggtcagacagaaaactcactacatatgggctatagtgcactagaaataaagagtaaaatgttagccctagagaaagcagatacctgtatttacaaccctttgtttggatcagatcttcagtatacaaatcgggtagataaagtggtaataaatccatactttggtctaggagctccagactactcaaaaatccaaatacctaaacaggaaaaatggcagagaagcatgagcagtgtcacagaagacaaggaacgacagtgggtagatgattttcctctccaccgaagcgcctgtgaaggagattcagaattactaagccgtcttctcagtgaaagattttcagtcaaccagttagatagtgaccactgggcacccattcattatgcatgctggtatggaaaagttgaggccactcgcatattgttagagaaaggaaagtgcaatccaaaccttttaaatggacaacttagttctcctcttcattttgctgctggaggaggacatgctgaaatagtacagattctcctaaaccacccagaaacggatagacatataacagaccaacaaggaagatctccattaaatatttgtgaagaaaacaaacaaaacaactgggaagaagctgcaaaattgttgaaggaagcaattaacaaaccatatgaaaaagttcgaatatacagaatggatgggtcatatcgttctgttgaattgaagcatggaaataataccacagtgcagcagataatggaaggaatgcgtctctctcaagaaactcagcaatatttcactatatggatttgttcagaaaacctcagccttcaactcaaaccatatcataaacccttgcaacatgttcgtgactggccagaaatacttgctgaattgactaatctggatcctcaaagggaaacacctcagctttttctaagaagagatgtgagacttcccttggaagttgaaaaacagattgaagacccactagctattcttattctctttgatgaagccagatataatttattgaagggcttttatacagctcctgatgctaagctgataacattggcaagtctgcttttgcaaatagtctatggaaattatgagagtaaaaaacacaagcaaggtttcctaaatgaagaaaatctaaaatccatcgtacctgttaccaaactgaaaagtaaggcacctcactggacaaatcgcatacttcatgaatacaagaatctcagtacaagtgaaggtgtcagtaaagaaatgcatcaccttcagcgcatgttcttacagaattgctgggaaattcctacttatggagcagcatttttcacaggacagatatttacaaaggcaagccccagcaatcataaagtcatccctgtgtatgtaggagtgaatataaaaggacttcatctcctcaacatggaaactaaggctttactcatcagtcttaagtatggttgttttatgtggcaattgggagatactgatacttgttttcagatccatagcatggaaaataaaatgagctttatagtacatacaaaacaggctggtctcgtggtaaaactgttaatgaagctaaatggacagttaatgcccactgaaagaaattcatgaaagagaagtaactgttactcaagccaccacattttggtgatgcagagtttcctttccgcgaaagatttcttaaaatattacttttgggcc

SEQ ID NO: 99 - DNA, 6588 bp, Homo sapiens
  CDS (816)..(3506)
atgcactgtttccttttctgaaactgactgatatgaactatatcaaaagcctcccttgccctctggcgtctggttggacttggccattgacaagcaccagcaggagactggaggagggtgcggggttcgggatgtcgaagacgctgaagaagaagaagcactggctcagcaaggtgcaggagtgcgccgtgtcctgggccgggcccccgggcgacttcggcgcggagatccgcggtggcgcggagcgtggcaagttcccctacctggggcggctccgcgaggagcccggcgggggcacctgctgcgtcgtctcgggcaaggcgcccagcccaggcgatgtgctgctggaggtaaacgggacgcctgtcagcgggctcaccaaccgggacaccctggctgtcatccgccacttccgcgagcccatccgtctcaagactgtgaaaccaggcaaagtcattaataaagatttgcggcattacctaagtcttcagtttcaaaaaggatcaattgaccacaaactgcagcaagtgatcagagataatctctacttgagaaccattccatgcactacaagggcccccagggatggagaagtaccaggagtggattataatttcatttccgttgaacagttcaaagcactggaagagagtggagcattgttagaaagtgggacatatgatggaaacttctatggaactcccaagcctccagcagaacccagcccttttcagccagatccagttgatcaagtcctctttgataatgagtttgatgcagaatctcaaagaaaacgaacgacatctgtcagcaagatggaaagaatggatagctctcttcctgaagaggaagaagatgaggacaaggaagctattaatggcagtggaaacgcagaaaacagagagaggcattctgagtcatctgactggatgaagactgttccaagttacaaccaaacaaatagctccatggactttagaaattatatgatgagagatgagactctggaaccactgcccaaaaactgggaaatggcctacactgacacagggatgatctacttcattgaccacaataccaagacaaccacctggttggatcctcgtctttgtaagaaagccaaagcccctgaagactgtgaagatggagagcttccttatggctgggagaaaatagaggaccctcagtatgggacatactatgttgatcaccttaaccagaaaacccagtttgaaaatccagtggaggaagccaaaaggaaaaagcagttaggacaggttgaaattgggtcttcaaaaccagatatggaaaaatcacacttcacaagagatccatcccagcttaaaggtgtccttgttcgagcatcactgaaaaaaagcacaatgggatttggttttactattattggtggagatagacctgatgagttcctacaagtgaaaaatgtgctgaaagatggtcccgcagctcaggatgggaaaattgcaccaggcgatgttattgtagacatcaatggcaactgtgtcctcggtcacactcatgcagatgttgtccagatgtttcaattggtacctgtcaatcagtatgtaaacctcactttatgtcgtggttatccacttcctgatgacagtgaagatcctgttgtggacattgttgctgctacccctgtcatcaatggacagtcattaaccaagggagagacttgcatgaatcctcaggattttaagccaggagcaatggttctggagcagaatggaaaatcgggacacactttgactggtgatggtctcaatggaccatcagatgcaagtgagcagagagtatccatggcatcgtcaggcagctcccagcctgaactagtgactatccctttgattaagggccctaaagggtttgggtttgcaattgctgacagccctactggacagaaggtgaaaatgatactggatagtcagtggtgtcaaggccttcagaaaggagatataattaaggaaatataccatcaaaatgtgcagaatttaacacatctccaagtggtagaggtgctaaagcagtttccagtaggtgctgatgtaccattgcttatcttaagaggaggtcctccttcaccaaccaaaactgccaaaatgaaaacagataaaaaggaaaatgcaggaagtttggaggccataaatgagcctattcctcagcctatgccttttccaccgagcattatcaggtcaggatccccaaaattggatccttctgaggtctacctgaaatctaagactttatatgaagataaaccaccaaacaccaaagatttggatgtttttcttcgaaaacaagagtcagggtttggcttcagggtgctaggaggagatggacctgaccagtctatatatattggggctattattcccctgggagcagctgagaaagatggtcggctccgcgcagctgatgaactaatgtgcattgatggaattcctgttaaagggaaatcacacaaacaagtcttggacctcatgacaactgctgctcgaaatggccatgtgttactaactgtcagacggaagatcttctatggagaaaaacaacccgaggacgacagctctcaggccttcatttcaacacagaatggatctccccgcctgaaccgggcagaggtcccagccaggcctgcaccccaggagccctatgatgttgtcttgcaacgaaaagaaaatgaaggatttggctttgtcatcctcacctccaaaaacaaaccacctccaggagttattcctcataaaattggccgagtcatagaaggaagtccggctgaccgctgtggaaaactgaaagttggagatcatatctctgcagtgaatgggcagtccattgttgaactgtctcatgataacattgttcagctgatcaaagatgctggtgtcaccgtcacactaacggtcattgctgaagaagagcatcatggtccaccatcaggaacaaactcagccaggcaaagcccagccctgcagcacaggcccatgggacagtcacaggccaaccacatacctggggacagaagtgccctagaaggtgaaattggaaaagatgtctccacttcttacagacattcttggtcagaccacaagcaccttgcacagcctgacaccgcagtaatttcagttgtaggcagtcggcacaatcagaaccttggttgttatccagtagagctggagagaggcccccggggctttggattcagcctccgaggggggaaggagtacaacatggggctgttcatccttcgtcttgctgaagatggtcctgccatcaaagatggcagaattcatgttggtgaccaaattgttgaaatcaatggggaacctacacaaggaatcacacatactcgagcaattgagctcattcaggctggtggaaataaagttcttcttcttttgaggccaggaactggcttgatacctgaccatggtttggctccttccggtctgtgctcctacgtgaaacccgagcaacattaaggctttcagggcttttcttggtctttccttaaaaagacttggtgattgggatattaataatccttcgtcttcaaatgtgatttatgatgaacagtcaccattacccccatcttcacattttgcttccatatttgaagagtctcacgtgccagtaattgaagaatctttgagagttcagatatgtgaaaaggcagaagaattaaaggacattgtgcctgaaaagaaaagcactttaaatgaaaatcagcctgagataaagcatcagtctcttctccagaaaaatgtgagtaagagggatccacccagcagtcatgggcacagtaacaagaaaaatctattaaaagtagaaaatggtgttacacgaagaggtagatcggttagtcccaaaaagccagccagtcaacattcagaggaacatttggataagattcctagtcctctaaaaaataaccccaaaagaagacccagagatcaatccctcagccccagcaaaggggaaaataaaagttgtcaggtcagcaccagggcaggctctggacaagatcagtgcagaaaaagcagaggtcggtcggccagcccaaaaaagcagcaaaaaattgaaggaagcaaagctccatcaaatgctgaggccaaattattagagggtaagagtcgaagaatagcaggctatacgggcagtaatgctgagcagatcccagatgggaaggaaaaatcagacgtcatcaggaaagatgcaaagcagaatcagttggaaaaaagcagaacaaggtctccagagaaaaaaatcaaaagaatggttgagaaatctcttccatccaaaatgactaataagactacaagtaaagaagtatctgaaaatgaaaaaggaaagaaagtaaccacaggagaaacaagttctagtaacgataaaataggagaaaatgtccagctatcagaaaagaggctgaagcaagaacctgaagagaaggtagtttcaaacaaaacagaagatcacaaagggaaagaactagaggcagctgacaaaaacaaagagactggaaggttcaaaccggaaagcagttctccagttaagaaaacactgataactccagggccctggaaggttccaagtggaaataaagtcacaggcactattggtatggctgagaaacggcagtaacctttagtataaaacaaagaaaaacaagttgtaatcttttcttacagcagcatttttccaaaaaaagcctttttttttttttcagatattctgaaacagataagtacatgttaatgtgagcctcaagttacctaggctgcatgaagggcctttaggattgctaagaaccaactgtccccctggccggctgccctccctcgctctcaggaaggagctgcatccacatgctcatctgacccgccctgctcaggctgcccagctcgtcttcatgagtgtctgaacaaatgacatatgttgatattaacaatgtggtcacaactcactttgtatttgtgccaagttatctactgtatcatgtctgtttttatcctttttgttcagctgtttccacagtaatgaaaaagttaggtttggcttggaagttgatgatctcaatagcatgttgcatgtttacagagagaaatatgtgagtccttgcagaagaagagactgttaactcatcgttaaagatggccgttgtctcttctaacagctactgatgatgtcccactttaaaaataaaacccccaaacatcactactttaaggaaaaaaaaaatgtagtccaatattgatgctttcttatggctttttattttaatttggctggataagttgtttcaaataactgttaaagatattacttacaattgaatgtttgaaataagaaagtactttaagcaatagagttcatctcctgctgtgttatccaacctcgatgtatacttacagcatctcaggtcaccctttttatttcagttatttaattatgaaaccataaagaagcatgtggaaatagtgtttattgctctttgaagaaaaaccaccaactatttctggatattttggctgtacctactactaaagtcattagtctttaatacataatacatatttgaaaagtaaacatattatatagattatgtgagggacttaatcatgaaaccagtttcacagtccaagtaccaactcttctggtagcaggtgcacaagcttgggtgtttaaaaacaacctgtgtagggtatgcccagcaaatgaggacaaatgtgtagacagtacttactggatcttatttaacttttagctacattaactaactttcttatttaaaaacaagaaagggagactaaacatctgcttaacttgtacacattttcagaattctttttaaaagtctagttaaagatgtttcttagaagttggagactgttaacaacttccataaaatagatccaggtttttcagttccctgaagcagcattcagtagcatctatataaataaaggcaccttctgagaataaaactattttatggagtgtgtgaacacacttgttctgtcacctgggttcatcttgttgtgaagcacattaggtccaggtccttccctctgggagtctgactgtgaaactctttaacccaacaactcaattagcccctgtagataagacatgcttcccagagtgagatttttgaaatccccttttcatccagaactatatttacccacctattgtaactattcagatagagcaaaattaggaggcttgataaatactaagaatttagtaccacagaaattatttattattttccctgtagtccacaattagtgataacgaatcctatttttgttaactgtgacataactttgatgtcatatgttgtcctatgtggttcttcctaagtaaactctgtactgattatatactgacttagcaatgtggccttggaatgctgagcaaaatgtggatgtactggttgtaaatgtttatatattgtacagtacctttatatatacacttgaggttctgattagagaaagatctgtaaattgctcattattttttatatagatatttaaaaaaaacaaaaaaaaaaaa

SEQ ID NO: 100 - DNA, 1916 bp, Homo sapiens
  CDS (492)..(1844)
agcagaaaattcctgaagaagaatacattattttgatagatggcttaaatgaagctgagtttcataaacctgattatggagatacgctttcttcatttattaccaaaattatttctaaatttcctgcctggttgaagttgattgtgactgtaagagcaaattttcaggaaatcataagtgcgctgccatttgtcaagctttccttagatgacttcccagacaacaaagacatccacagtgacctgcacgcctacgtccagcacagggtgcacagcagccaggacatcctcagcaacatctccctgaatggcaaggccgatgccacactcattggaaaagtgagcagccacctggtgctgcggagcctcggctcctacctgtacctcaagctcaccctggaccttttccagaggggccacttggtcattaagagtgccagctacaaggtggtgcccgtgtctctctctgagctctatttgcttcagtgcaacatgaagttcatgacccagtccgcctttgagagggcacttccgattctcaacgtggccctcgcatccctccaccccatgacagacgagcagatctttcaggctattaatgctggccacatccagggggagcagggatgggaagactttcagcagaggatggacgccctctcctgcttcctcattaagaggcgagacaaaacccgcatgttctgccacccgtccttcagggagtggcttgtatggagagcagacggggaaaacacggccttcctgtgtgagcccaggaacgggcacgcgctcttggcattcatgttctcgcgtcaggagggcaagttgaaccgccagcagaccatggagcttggccaccacatcctgaaggcgcacattttcaagggcctcagtaagaagacgggaatttcttcaagccatctccaagccctgtggatcggctacagcaccgaggggctgtccgccgccctggcctctctcaggaatctctatactcccaacgtgaaggtgagccgtctcctgattttgggaggggccaacgtgaactacaggacagaagtgttaaataatgccccaatcctgtgcgtccagtctcaccttggccacgaggaagttgtcactctgctcctggaatttggtgcctgcctggacggaacgtcagagaacggcatgactgccctctgttacgcagcagctgctggccacatgaagctggtgtgtctgctgaccaagaagggagtgagagtggaccacttggataagaagggccagtgtgcgcttgtccacagtgccctacggggccacggtgacattctccagtacctgctgacttgtgagtggtcgccgggtcctccccagccaggcaccctgaggaagagccacgccctgcagcaggcgctgaccgcggcggccagcatgggccacagctcggtggtccagtgcttgctggggatggagaaggaacatgaagtagaagtcaatggcaccgacacattgtggggagaaacagccctgactgccgccgcaggaagagggaagctggaggtctgtgagctgctgctggggcatggagctgctgtgtcgcggacaaacaggagaggggttccacctttgttttgtgcagcacgccaggggcattggcagattgttagactgctgttggaacgcggctgtgatgtgaacctaagtgacaagcaaggccggacgcccctcatggtggctgcttgtgaagggcacttgagcaccgtggaattcctcctttcaaaaggtagcagcgtgatgcccctcaaaggtttcttttggacggacacagagagaacttcagcagacccattcagtgctttctgattcaaattctaagttttctgttaatggaaattttctaataaacagtagagagaataggcaaaaaaaaaa

SEQ ID NO: 101 - DNA, 3851 bp, Homo sapiens
  CDS (492)..(2357)
agcagaaaattcctgaagaagaatacattattttgatagatggcttaaatgaagctgagtttcataaacctgattatggagatacgctttcttcatttattaccaaaattatttctaaatttcctgcctggttgaagttgattgtgactgtaagagcaaattttcaggaaatcataagtgcgctgccatttgtcaagctttccttagatgacttcccagacaacaaagacatccacagtgacctgcacgcctacgtccagcacagggtgcacagcagccaggacatcctcagcaacatctccctgaatggcaaggccgatgccacactcattggaaaagtgagcagccacctggtgctgcggagcctcggctcctacctgtacctcaagctcaccctggaccttttccagaggggccacttggtcattaagagtgccagctacaaggtggtgcccgtgtctctctctgagctctatttgcttcagtgcaacatgaagttcatgacccagtccgcctttgagagggcacttccgattctcaacgtggccctcgcatccctccaccccatgacagacgagcagatctttcaggctattaatgctggccacatccagggggagcagggatgggaagactttcagcagaggatggacgccctctcctgcttcctcattaagaggcgagacaaaacccgcatgttctgccacccgtccttcagggagtggcttgtatggagagcagacggggaaaacacggccttcctgtgtgagcccaggaacgggcacgcgctcttggcattcatgttctcgcgtcaggagggcaagttgaaccgccagcagaccatggagcttggccaccacatcctgaaggcgcacattttcaagggcctcagtaagaagacgggaatttcttcaagccatctccaagccctgtggatcggctacagcaccgaggggctgtccgccgccctggcctctctcaggaatctctatactcccaacgtgaaggtgagccgtctcctgattttgggaggggccaacgtgaactacaggacagaagtgttaaataatgccccaatcctgtgcgtccagtctcaccttggccacgaggaagttgtcactctgctcctggaatttggtgcctgcctggacggaacgtcagagaacggcatgactgccctctgttacgcagcagctgctggccacatgaagctggtgtgtctgctgaccaagaagggagtgagagtggaccacttggataagaagggccagtgtgcgcttgtccacagtgccctacggggccacggtgacattctccagtacctgctgacttgtgagtggtcgccgggtcctccccagccaggcaccctgaggaagagccacgccctgcagcaggcgctgaccgcggcggccagcatgggccacagctcggtggtccagtgcttgctggggatggagaaggaacatgaagtagaagtcaatggcaccgacacattgtggggagaaacagccctgactgccgccgcaggaagagggaagctggaggtctgtgagctgctgctggggcatggagctgctgtgtcgcggacaaacaggagaggggttccacctttgttttgtgcagcacgccaggggcattggcagattgttagactgctgttggaacgcggctgtgatgtgaacctaagtgacaagcaaggccggacgcccctcatggtggctgcttgtgaagggcacttgagcaccgtggaattcctcctttcaaaaggtgcagccctttcttctctagacaaagagggtctgtcagcattaagctgggcttgtctgaaaggtcacagggcagtggtccagtatctggttgaagaaggagctgcaatagaccagacagacaagaatggccgcacacccttggacctggctgccttctatggcgatgccgagactgtgctgtacctggtggagaagggagccgtgatcgagcatgtggaccacagcgggatgcggcccttggacagagccatcggctgccggaacacatctgtagtggtggcgctactcagaaagggagccaagttaggaaatgctgcttgggcgatggccacttccaaacctgatatcttgattatacttttacagaaattaatggaggaaggaaatgtgatgtacaaaaaagggaaaatgaaagaggcagcccagaggtaccagtatgccttaagaaagtttcctcgagaaggattcggagaggacatgagacccttcaatgaattaagggtttccctctatctcaatttgtcgcgatgccgaagaaaaaccaatgactttggcatggcagaggaatttgcttccaaggctctcgaatagaagcccaagtcctatgaagccttttatgccagagcaagagcgaagagaaatagcaggcaattcgtggcagctctggctgacctgcaagaggctgtgaaactctgtcccaccaatcaggaagtcaagaggcttctggcccgcgtagaagaggagtgcaaacaactccagaggagtcaacagcaaaaacagcagggcccgctaccagctccactcaacgactccgagaacgaagaggacaccccaacccctggcttaagtgaccactttcactctgaggagactgaagaggaagaaacttctccccaggaagaatctgtttccccaactcccaggtcccagccatcctcatctgtcccttcctcatacatccgaaaccttcaagaagggttacagtccaaaggaaggccggtatcgccacagagcagggcaggaatcggcaagtccctgagagagcctgtggcccagccagggctgctcctgcatccctccaagcaggcccagatcgtgaaaaccagccagcacctgggctctggccagtcggcagtgagaaatggcagtatgaaagttcagatctcttctcagaaccctcctccaagtcccatgccagggagaatcgctgctgctcctgctgggagcagaacccagcatttagagggaacgggtactttcactacaagagctggttgtggccactttggggatcggctgggccccagccagaatgtccgcctgcagtgtggtgagaatggccctgcacaccctttaccaagtaagacgaaaaccacagagaggcttctgtctcattcctccgtggctgtggacgcagcccctccaaaccaaggtgggctggcgacctgcagcgacgtgcgacacccagcttccctcaccagctcaggctcttctggttctccatccagcagcataaagatgtcaagttcaaccagtagtttgacttcgagcagcagtttttcagatggcttcaaggtccaaggaccagatactagaattaaagacaaggttgtaacccacgttcagagcggtacagctgagcacagaccccgcaacacgccgttcatgggcatcatggataagactgcgaggttccaacagcagagcaatcctccaagccgcagctggcactgtccggcaccagaggggctgctgacaaacacgtcttctgcagctggcctgcagtctgctaacactgagaagccctctctcatgcaagtgggaggatataataaccaagccaaaacctgttctgtttctaccctgagtgcaagtgtccacaatggggcacaagtgaaggagctagaagaaagcaagtgccaaattccagtccactctcaagagaacaggataactaagactgtttctcatctgtaccaggaaagtatctccaaacagcagcctcatattagtaatgaagcccacaggagccacctcactgcagccaaaccaaagcgatcatttatagagtcaaatgtgtga

SEQ ID NO: 102 - DNA, 3939 bp, Homo sapiens
  CDS (1)..(2415)
atggctgaaggcagcatgaaccctaaactcttagatacttggataattcattgggaacaacaacagacagagttgaagctagtctttaagaatattccctacaagccagcacagacaaaaatctttcagacctgttactgtgaggcctttaatccatcttcaccgccgctttcttcccttgctttgtcttttaaagtttcaggggactgtcacaaacagggtcttactcagggcctcctgctgctgctctgtggccttgttgagcccgtggggctggttcctgtggctcctcctggccagttgtccaccgcagatggcggcgagggagacggtgaaggttggctcccgcctgtctgggctctgatcctctgtctccccctccccctgcggccggctcatggcctggcggaggcccgaaccaaagacctccgcaccgccgtgtacaacgccgcccgtgacggcaagggggcagctgctccagaagctgctcagcagccggagccgggaggaactggacgagctgactggctaggtggccggcggggggacgccgctgctcatcgccgcctgctacggccacctggacgtggtggagtacctggtggacccgtgcggcgcgagcgtggaggccggtggctcggtgcacttcgatggcgagaccatggagggtgcgccgccgctgtgggcgcggaccacctggacgtggtacggagcctgctgcgccgcggggcctcggtgaactgcaccacgcgcaccaactccacgcccctccgcgccgcctgcttcgagggcctcctggaggtggtgcgctacctggtcggcgagcaccaggccaacctggaggtggccaaccggcacggccacatgtgcctcatgatctcgtgctacaagggccaccgtgagatcgcccgctacctgctggagcagggcgcccaggtgaactggcgcagcgccaagggcaacacggccctgcacaactgtgccgagaccagcagcctggagatcctgcagctgctgctggggtgcaaggccagcatggaacgtgatagctacggcatgaccccgttgctcccggccagcgtgacgggccacaccaacatcgtggagtacctcatccaggagcagcccggccaggagcagctcataggggtagaggctcagcttaggctgccccaagaaggctcctccaccagccaggggtgtgcgcagcctcagggggctccgtgctgcatcttctcccctgaggtactgaacggggaatcttaccaaagctgctgtcccaccagccgggaagctgccatggaagccttggaattgctgggatctacctatgtggataagaaacgagatctgcttggggcccttaaacactggaggcgggccatggagctgcgtcaccaggggggtgagtacctgcccaaactggagcccccacagctggtcctggcctatgactattccagggaggtcaacaccaccgaggagctggaggcgctgatcaccgacccggatgagatgcgcatgcaggccctgttgatccgggagcgcatcctcggtccctcgcacccggacacttcctattacatccgttacaggggtgccgtgtacgccgactcgggcaatttcgagcgctgcatccgcttgtggaagtacgccctggacatgcaacagagcaacctggagcctctgagccccatgaccgccagcagcttcctctccttcgcggaactcttctcctacgtgcttcaggaccgggccgccaaaggcagcctgggcacccagatcggctttgcagacctcatgggggttctcaccaaaggggtccgggaagtggaacgggccctgcagctgcccagggagcccggagactcagcccagttcaccaaggcgctggccatcatcctccacctgctctacctgctggagaaagtggagtgcacccccagccgggagcacctgaagcaccagaccgtctaccgcctgctcaagtgcgcgcccaggggcaagaacggcttcacccctctgcacatggctgtggacaaggacaccacaaacgtgggccgctatcccgtgggcagattcccctccctgcacgtggtcaaagtgctgctcgactgcggggccgacccggacagcagggattttgacaacaacaccccgctacacatagcagcccagaacaactgcccggccatcatgaatgccctgatcgaagcaggggcccacatggacgccaccaatgccttcaagaagacggcctacgagctgctggacgagaagctgctggccaggggtaccatgcagcccttcaactacgtgaccctgcagtgccttgcggcccgggccctggataagaacaagatcccttacaagggcttcatcccggaagatctggaggcgttcatcgaactgcactgacctgcccagaacgcctgcaccctcacctctcccctctcctgctgagatgggggaaatccggctgcggcatagcagatgctcgttcttgcctccttcaggcaccaatcaggagaagggttctgcctcccatcccctctacctgcagacagggtcggaggtgttagcgagcctttggtgctagaagcctgcggggtcatgtgctaagaggacagtctttctccgggagcccgctcactcattctgagttaggaaaagacacaagaccttccccacatcctgtctgcctgggttagggaggcctttgccttgttacctagaggcggagggactgaagccattgcgttccttccctgctagaaacacaggaagaagttgaggacggtctgccttccctcgtccctttacctggccagataactccagccgctgaatacagtgttaggactgggggctcctgagatgagagtttgagattcagggaatgagaccacctctcatttcttccagcatgatcgcgccctgctcccgtgccaccgtagtccctggcagacaggcagggctctgcccagggcagcctgccacttgcatagctttcggttggtttggtgttctgtttatttaataagtgggcaggttgcaagcgttgcacagaaattctgagattttactgccttttttttttttttaagaaagttgtttgttggactccataagtgaatttcaagcagtgaggattttgtggtgcctgagatggccgagggcacagggagtgagctgtatgtgtgaggaatttggtgagcgagataaaagtccacggtgtcaacccctaaaacatgggtgaccgtacatttttatacatctccactctacggccttttacaggctttccgattttacaggcctttccaagtttccattctccttagagagagaactgtgcttccaaacagaaatcaggagtgaccacaaagcctgaaaacactttgccacccagcaaagaactggcacaattggtttgggtctgcattgccatagtgcccgagttaaaactgcaggccactctgccttgcaaacctcacgtggcctctgatttcattgtgggtgcatccacaggtggcccgagctgttctttcagctgctccaaggattgagacccaagtcatcatgaaaaaggcccaagtacagtcttaatgcgataaatccactagctaagacgtcgagtgccaagaccagccttccagccgaggtttggacaaagtctcaggttcccgtgactcagggtaaggtgctggggctgccagaggacctgccccagcaagatttttgtcaagagcgagactccatcagcccaggcagacgggagcaggttcttggccagcgtagacagcagcaaacagcagcagggaagccattctcactgcatcctccctgcagtagccacggccaggcccttaggaggagcagtgaccgggggtgtccagaaatatcctgtccctggatggaaactaggtctcgtttgga

SEQ ID NO: 103 - DNA, 11640 bp, Homo sapiens
  CDS (297)..(11366)
ccttccctgggcctggggcctggggcctggggcctgggtgtggttctcggaagaaggagcctgaggccagtgatgtggccgctcagttccagaagcttccggaggatgcaaggagatacgcaagaaccccctagaaggaccccctggcccaggtccagggtgacgttgacctcgttgtactccaggccgcgggacagcggtggactctgccaccagcgctccgtgccatcgatggcattgctcgcggggtgtgccttgttgctgttggcagccgtgcagatgtcgcagtactggccatggcgaagcggctctgcgcggggagcgcactgtgtgttcgcggcccccggggccccgcgccgctgctgctggtcgggctggcgctgctgggcgcggcgcgggcgcgggaggaggcgggcggcggcttcagcctgcacccgccctacttcaacctggccgagggcgcccgcatcgccgcctccgcgacctgcggagaggaggccccggcgcgcggctccccgcgccccaccgaggacctttactgcaagctggtagggggccccgtggccggcggcgaccccaaccagaccatccggggccagtactgtgacatctgcacggctgccaacagcaacaaggcacaccccgcgagcaatgccatcgatggcacggagcgctggtggcagagtccaccgctgtcccgcggcctggagtacaacgaggtcaacgtcaccctggacctgggccaggtcttccacgtggcctacgtcctcatcaagtttgccaactcaccccggccggacctctgggtgctggagcggtccatggacttcggccgcacctaccagccctggcagttctttgcctcctctaagagggactgtctggagcggttcgggccacagacgctggagcgcatcacacgggacgacgcagccatctgcaccaccgagtactcacgcatcgtgcccctggagaacggagagatcgtggtgtccctggtgaacggacgtccgggcgccatgaatttctcctactcgccgctgctacgtgagttcaccaaggccaccaacgtccgcctgcgcttcctgcgtaccaacacgctgctgggccatctcatggggaaggcgctgcgggaccccacggtcacccgccggtattattacagcatcaaggatatcagcatcggaggccgctgtgtctgccacggccacgcggatgcctgcgatgccaaagaccccacggacccgttcaggctgcagtgcacctgccagcacaacacctgcgggggcacctgcgaccgctgctgccccggcttcaatcagcagccgtggaagcctgcgactgccaacagtgccaacgagtgccagtcctgtaactgctacggccatgccaccgactgttactacgaccctgaggtggaccggcgccgcgccagccagagcctggatggcacctatcagggtgggggtgtctgtatcgactgccagcaccacaccaccggcgtcaactgtgagcgctgcctgcccggcttctaccgctctcccaaccaccctctcgactcgccccacgtctgccgccgctgcaactgcgagtccgacttcacggatggcacctgcgaggacctgacgggtcgatgctactgccggcccaacttctctggggagcggtgtgacgtgtgtgccgagggcttcacgggcttcccaagctgctacccgacgccctcgtcctccaatgacaccagggagcaggtgctgccagccggccagattgtgaattgtgactgcagcgcggcagggacccagggcaacgcctgccggaaggacccaagggtgggacgctgtctgtgcaaacccaacttccaaggcacccattgtgagctctgcgcgccagggttctacggccccggctgccagccctgccagtgttccagccctggagtggccgatgaccgctgtgaccctgacacaggccagtgcaggtgccgagtgggcttcgagggggccacatgtgatcgctgtgcccccggctactttcacttccctctctgccagttgtgtggctgcagccctgcaggaaccttgcccgagggctgcgatgaggccggccgctgcctatgccagcctgagtttgctggacctcattgtgaccggtgccgccctggctaccatggtttccccaactgccaagcatgcacctgcgaccctcggggagccctggaccagctctgtggggcgggaggtttgtgccgctgccgccccggctacacaggcactgcctgccaggaatgcagccccggctttcacggcttccccagctgtgtcccctgccactgctctgctgaaggctccctgcacgcagcctgtgacccccggagtgggcagtgcagctgccggccccgtgtgacggggctgcggtgtgacacatgtgtgcccggtgcctacaacttcccctactgcgaagctggctcttgccaccctgccggtctggccccagtggatcctgcccttcctgaggcacaggttccctgtatgtgccgggctcacgtggaggggccgagctgtgaccgctgcaaacctgggttctggggactgagccccagcaaccccgagggctgtacccgctgcagctgcgacctcaggggcacactgggtggagttgctgagtgccagccgggcaccggccagtgcttctgcaagccccacgtgtgcggccaggcctgcgcgtcctgcaaggatggcttctttggactggatcaggctgactattttggctgccgcagctgccggtgtgacattggcggtgcactgggccagagctgtgaaccgaggacgggcgtctgccggtgccgccccaacacccagggccccacctgcagcgagcctgcgagggaccactacctcccggacctgcaccacctgcgcctggagctggaggaggctgccacacctgagggtcacgccgtgcgctttggcttcaaccccctcgagttcgagaacttcagctggaggggctacgcgcagatggcacctgtccagcccaggatcgtggccaggctgaacctgacctcccctgaccttttctggctcgtcttccgatacgtcaaccggggggccatgagtgtgagcgggcgggtctctgtgcgagaggagggcaggtcggccacctgcgccaactgcacagcacagagtcagcccgtggccttcccacccagcacggagcctgccttcatcaccgtgccccagaggggcttcggagagccctttgtgctgaaccctggcacctgggccctgcgtgtggaggccgaaggggtgctcctggactacgtggttctgctgcctagcgcatactacgaggcggcgctcctgcagctgcgggtgactgaggcctgcacataccgtccctctgcccagcagtctggcgacaactgcctcctctacacacacctccccctggatggcttcccctcggccgccgggctggaggccctgtgtcgccaggacaacagcctgccccggccctgccccacggagcagctcagcccgtcgcacccgccactgatcacctgcacgggcagtgatgtggacgtccagcttcaagtggcagtgccacagccaggccgctatgccctagtggtggagtacgccaatgaggatgcccgccaggaggtgggcgtggccgtgcacaccccacagcgggccccccagcaggggctgctctccctgcacccctgcctgtacagcaccctgtgccggggcactgcccgggatacccaggaccacctggctgtcttccacctggactcggaggccagcgtgaggctcacagccgaacaggcacgcttcttcctgcacggggtcactctggtgcccattgaggagttcagcccggagttcgtggagccccgggtcagctgcatcagcagccacggcgcctttggccccaacagtgccgcctgtctgccctcgcgcttcccaaagccgccccagcccatcatcctcagggactgccaggtgatcccgctgccgcccggcctcccgctgacccacgcgcaggatctcactccagccatgtccccagctggaccccgacctcggccccccaccgctgtggaccctgatgcagagcccaccctgctgcgtgagccccaggccaccgtggtcttcaccacccatgtgcccacgctgggccgctatgccttcctgctgcacggctaccagccagcccaccccaccttccccgtggaagtcctcatcaacgccggccgcgtgtggcagggccacgccaacgccagcttctgtccacatggctacggctgccgcaccctggtggtgtgtgagggccaggccctgctggacgtgacccacagcgagctcactgtgaccgtgcgtgtgcccaagggccggtggctctggctggattatgtactcgtggtccctgagaacgtctacagctttggctacctccgggaggagcccctggataaatcctatgacttcatcagccactgcgcagcccagggctaccacatcagccccagcagctcatccctgttctgccgaaacgctgctgcttccctctccctcttctataacaacggagcccgtccatgtggctgccacgaagtaggtgctacaggccccacgtgtgagcccttcgggggccagtgtccctgccatgcccatgtcattggccgtgactgctcccgctgtgccaccggatactggggcttccccaactgcaggccctgtgactgcggtgcccgcctctgtgacgagctcacgggccagtgcatctgcccgccacgcaccatcccgcccgactgcctgctgtgccagccccagacctttggctgccaccccctggtcggctgtgaggagtgtaactgctcagggcccggcatccaggagctcacagaccctacctgtgacacagacagcggccagtgcaagtgcagacccaacgtgactgggcgccgctgtgatacctgctctccgggcttccatggctacccccgctgccgcccctgtgactgtcacgaggcgggcactgcgcctggcgtgtgtgaccccctcacagggcagtgctactgtaaggagaacgtgcagggccccaaatgtgaccagtgcagccttgggaccttctcactggatgctgccaaccccaaaggttgcacccgctgcttctgctttggggccacggagcgctgccggagctcgtcctacacccgccaggagttcgtggatatggagggatgggtgctgctgagcactgaccggcaggtggtgccccacgagcggcagccagggacggagatgctccgtgcagacctgcggcacgtgcctgaggctgtgcccgaggctttccccgagctgtactggcaggccccaccctcctacctgggggaccgggtgtcatcctacggtgggaccctccgttatgaactgcactcagagacccagcggggagatgtctttgtccccatggagagcaggccggatgtggtgctgcagggcaaccagatgagcatcacattcctggagccggcataccccacgcctggccacgttcaccgtgggcagctgcagctggtggaggggaacttccggcatacggagacgcgcaacactgtgtcccgcgaggagctcatgatggtgctggccagcctggagcagctgcagatccgtgccctcttctcacagatctcctcggctgtcttcctgcgcagggtggcactggaggtggccagcccagcaggccagggggccctggccagcaatgtggagctgtgcctgtgccccgccagctaccggggggactcatgccaggaatgtgcccccggcttctatcgggacgtcaaaggtctcttcctgggccgatgtgtcccttgtcagtgccatggacactcagaccgctgcctccctggctctggcgtctgtgtggactgccagcacaacaccgaaggggcccactgtgagcgctgccaggctggcttcgtgagcagcagggacgaccccagcgccccctgtgtcagctgcccctgccccctctcagtgccttccaacaacttcgccgagggctgtgtcctgcgaggcggccgcacccagtgcctctgcaaacctggttatgcaggtgcctcctgcgagcggtgtgcgcccggattctttgggaacccactggtgctgggcagctcctgccagccatgcgactgcagcggcaacggtgaccccaacttgctcttcagcgactgcgaccccctgacgggcgcctgccgtggctgcctgcgccacaccactgggccccgctgcgagatctgtgcccccggcttctacggcaacgccctgctgcccggcaactgcacccggtgcgactgtaccccatgtgggacagaggcctgcgacccccacagcgggcactgcctgtgcaaggcgggcgtgactgggcggcgctgtgaccgctgccaggagggacattttggtttcgatggctgcgggggctgccgcccgtgtgcttgtggaccggccgccgagggctccgagtgccacccccagagcggacagtgccactgccgaccagggaccatgggaccccagtgccgcgagtgtgcccctggctactgggggctccctgagcagggctgcaggcgctgccagtgccctgggggccgctgtgaccctcacacgggccgctgcaactgccccccggggctcagcggggagcgctgcgacacctgcagccagcagcatcaggtgcctgttccaggcgggcctgtgggccacagcatccactgtgaagtgtgtgaccactgtgtggtcctgctcctggatgacctggaacgggccggcgccctcctccccgccattcacgagcaactgcgtggcatcaatgccagctccatggcctgggcccgtctgcacaggctgaacgcctccatcgctgacctgcagagccagctccggagccccctgggcccccgccatgagacggcacagcagctggaggtgctggagcagcagagcacaagcctcgggcaggacgcacggcggctaggcggccaggccgtggggacccgagaccaggcgagccaattgctggccggcaccgaggccacactgggccatgcgaagacgctgttggcggccatccgggctgtggaccgcaccctgagcgagctcatgtcccagacgggccacctggggctggccaatgcctcggctccatcaggtgagcagctgctccggacactggccgaggtggagcggctgctctgggagatgcgggcccgggacctgggggccccgcaggcagcagctgaggctgagttggctgcagcacagagattgctggcccgggtgcaggagcagctgagcagcctctgggaggagaaccaggcactggccacacaaacccgcgaccggctggcccagcacgaggccggcctcatggacctgcgagaggctttgaaccgggcagtggacgccacacgggaggcccaggagctcaacagccgcaaccaggagcgcctggaggaagccctgcaaaggaagcaggagctgtcccgggacaatgccaccctgcaggccactctgcatgcggctagggacaccctggccagcgtcttcagattgctgcacagcctggaccaggctaaggaggagctggagcgcctcgccgccagcctggatggggctcggaccccactgctgcagaggatgcagaccttctccccggcgggcagcaagctgcgtctagtggaggccgccgaggcccacgcacagcagctgggccagctggcactcaatctgtccagcatcatcctggacgtcaaccaggaccgcctcacccagagggccatcgaggcctccaacgcctacagccgcatcctgcaggccgtgcaggctgccgaggatgctgctggccaggccctgcagcaggcggaccacacgtgggcgacggtggtgcggcagggcctggtggaccgagcccagcagctcctggccaacagcactgcactagaagaggccatgctccaggaacagcagaggctgggccttgtgtgggctgccctccagggtgccaggacccagctccgagatgtccgggccaagaaggaccagctggaggcgcacatccaggcggcgcaggccatgcttgccatggacacagacgagacaagcaagaagatcgcacatgccaaggctgtggctgctgaagcccaggacaccgccacccgtgtgcagtcccagctgcaggccatgcaggagaatgtggagcggtggcagggccagtacgagggcctgcggggccaggacctgggccaggcagtgcttgacgcaggccactcagtgtccaccctggagaagacgctgccccagctgctggccaagctgagcatcctggagaaccgtggggtgcacaacgccagcctggccctgtccgccagcattggccgcgtgcgagagctcattgcccaggcccggggggctgccagtaaggtcaaggtgcccatgaagttcaacgggcgctcaggggtgcagctgcgcaccccacgggatcttgccgaccttgctgcctacactgccctcaagttctacctgcagggcccagagcctgagcctgggcagggtaccgaggatcgctttgtgatgtacatgggcagccgccaggccactggggactacatgggtgtgtctctgcgtgacaagaaggtgcactgggtgtatcagctgggtgaggcgggccctgcagtcctaagcatcgatgaggacattggggagcagttcgcagctgtcagcctggacaggactctccagtttggccacatgtccgtcacagtggagagacagatgatccaggaaaccaagggtgacacggtggcccctggggcagaggggctgctcaacctgcggccagacgacttcgtcttctacgtcggggggtaccccagtaccttcacgccccctcccctgcttcgcttccccggctaccggggctgcatcgagatggacacgctgaatgaggaggtggtcagcctctacaacttcgagaggaccttccagctggacacggctgtggacaggccttgtgcccgctccaagtcgaccggggacccgtggctcacggacggctcctacctggacggcaccggcttcgcccgcatcagcttcgacagtcagatcagcaccaccaagcgcttcgagcaggagctgcggctcgtgtcctacagcggggtgctcttcttcctgaagcagcagagccagttcctgtgcttggccgtgcaagaaggcagcctcgtgctgttgtatgactttggggctggcctgaaaaaggccgtcccactgcagcccccaccgcccctgacctcggccagcaaggcgatccaggtgttcctgctggggggcagccgcaagcgtgtgctggtgcgtgtggagcgggccacggtgtacagcgtggagcaggacaatgatctggagctggccgacgcctactacctggggggcgtgccgcccgaccagctgcccccgagcctgcgacggctcttccccaccggaggctcagtccgtggctgcgtcaaaggcatcaaggccctgggcaagtatgtggacctcaagcggctgaacacgacaggcgtgagcgccggctgcaccgccgacctgctggtggggcgcgccatgactttccatggccacggcttccttcgcctggcgctctcgaacgtggcaccgctcactggcaacgtctactccggcttcggcttccacagcgcccaggacagtgccctgctctactaccgggcgtccccggatgggctatgccaggtgtccctgcagcagggccgtgtgagcctacagctcctgaggactgaagtgaaaactcaagcgggcttcgccgatggtgccccccattacgtcgccttctacagcaatgccacgggagtctggctgtatgtcgatgaccagctccagcagatgaagccccaccggggaccaccccccgagctccagccgcagcctgaggggcccccgaggctcctcctgggaggcctgcctgagtctggcaccatttacaacttcagtggctgcatcagcaacgtcttcgtgcagcggctcctgggcccacagcgcgtatttgatctgcagcagaacctgggcagcgtcaatgtgagcacgggctgtgcacccgccctgcaagcccagaccccgggcctggggcctagaggactgcaggcctcccgccgcagccgtcagcccgcccggcatcctgcctgcatgctgcccccacacctcaggaccacccgagactcctaccagtttgggggttccctgtccagtcacctggagtttgtgggcatcctggcccgacataggaactggcccagtctctccatgcacgtcctcccgcgaagctcccgaggcctcctcctcttcactgcccgtctgaggcccggcagcccctccctggcgctcttcctgagcaatggccacttcgttgcacagatggaaggcctcgggactcggctccgcgcccagagccgccagcgctcccggcctggccgctggcacaaggtctccgtgcgctgggagaagaaccggatcctgctggtgacggacggggcccgggcctggagccaggaggggccgcaccggcagcaccagggggcagagcacccccagccccacaccctctttgtgggcggcctcccggccagcagccacagctccaaacttccggtgaccgtcgggttcagcggctgtgtgaagagactgaggctgcacgggaggcccctgggggcccccacacggatggcaggggtcacaccctgcatcttgggccccctggaggcgggcctgttcttcccaggcagcgggggagttatcactttagacctcccaggagctacactgcctgatgtgggcctggaactggaggtgcggcccctggcagtcaccggactgatcttccacttgggccaggcccggacgcccccctacttgcagttgcaggtgaccgagaagcaagtcctgctgcgggcggatgacggagcaggggagttctccacgtcagtgacccgcccctcagtgctgtgtgatggccagtggcaccggctagcggtgatgaaaagcgggaatgtgctccggctggaggtggacgcgcagagcaaccacaccgtgggccccttgctggcggctgcagctggtgccccagcccctctgtacctcgggggcctgcctgagcccatggccgtgcagccctggccccccgcctactgcggctgcatgaggaggctggcggtgaaccggtcccccgtcgccatgactcgctctgtggaggtccacggggcagtgggggccagtggctgcccagccgcctaggacacagccaaccccggcccctggtcaggcccctgcagctgcctcacaccgccccttgtgctcgcctcataggtgtctatttggactctaagctctacgggtgacagatcttgtttctgaagatggtttaagttatagcttcttaaacgaaagaataaaatactgcaaaatgtttttatatttggcccttccacccatttttaattgtgagagatttgtcaccaatcatcactggttcctccttaaaaattaaaaagtaacttctgtgtaa

SEQ ID NO: 104 - DNA, 1725 bp, Homo sapiens
  CDS (83)..(1552)
ctggccggacgtagacgcggtggcagagcccgcgcggcgctggaagcgagtggcggagcggcgggacctcggcggactcgccatggaggaggagggtgtgaaggaagccggtgagaagcctcggggagcacagatggtggacaaggctggctggatcaagaagagcagtgggggcctcctgggtttctggaaagaccgatatctgctcctctgccaggcccagctgctggtctatgagaatgaggatgatcagaagtgtgtggagactgtggagctgggcagctatgagaagtgccaggaccttcgtgccctcctcaagcgaaaacaccgctttatcctgctgcgatccccagggaacaaggtcagcgacatcaaattccaggcacccaccggggaggagaaggaatcctggatcaaagccctcaatgaagggattaaccgaggcaaaaacaaggctttcgatgaggtaaaggtggacaagagctgcgccctggagcatgtgacacgggaccgggtgcgagggggccagcgacgccggccaccaacgagagtccacctgaaggaggtggccagtgcagcttctgacggtcttctgcgcctggatcttgatgttccggacagtgggccaccagtgtttgcccccagcaatcatgtcagtgaagcccaacctcgggagacaccccggcccctcatgcctcctaccaagcctttcctagcacctgagaccaccagccctggtgacagggtggagacccctgtgggggagagagccccaacccctgtctcagcaagctctgaggtctcccctgagagccaagaggactcagagaccccagcagaggaggacagtggctctgagcagcctcccaacagcgtcctgcctgacaaactgaaggtgagctgggagaaccccagcccccaggaggcccctgctgcagagagtgcagaaccgtcccaggcaccctgttctgagacttctgaggctgcccccagggagggtgggaagccccctacacccccacccaagatcttatcagagaaactgaaagcctccatgggtgagatgcaggcttctgggccacctgctccaggcacagtgcaggtctcagtgaatggcatggatgacagtcctgagcctgccaagccctctcaggctgagggcaccccaggaactcctccaaaggatgcaacaacatccacagcactgcccccctgggacctgccacctcagttccatccccgctgctcctcccttggggacttgcttggggaaggcccgcggcatcccttgcagcccagggaacggctatatcgggcccagctggaggtgaaggtggcctcggaacagacggagaaactgttgaacaaggtgctgggcagtgagccggcccctgttagtgccgaaacattgctcagccaggctgtggagcagctgaggcaggccacccaggtcctgcaggaaatgagagatttgggagagctgagccaggaagcacctgggctaagggagaagcggaaggagctggtgaccctctacaggagaagtgcaccctagggccttctgggccagaggcaccatcccttctggccatccatcaagtccatcaaggcccagccctgctgagaaatgtgcttctgcttctacagcaatggctgcaggaggggcattgggcatgtcagggtttggccatgacccgaagagactcctggcgtccttcctactct

SEQ ID NO: 105 - DNA, 1530 bp, Homo sapiens
  CDS (663)..(1466)
tcaagtgcttgctagccatggatgccaactaacttcttcaattgaaggccggaggatcatatcgggttccaggagcctcttgagcaggtcctggcaatcggccgagatgctcagatgagtggggaaggacacccccttctgctgctgccacagcatcttggggatgtctgtgtcgtcaaaaggtaggctggcacagagcatgacatacaggaccacacccatgctccagacatcaccttttttgctatcgtggggaatgccctgcagcacctcgggggcagcataggctgtactgccgcagaaggtctggctcagctcccggtgtgacttgggcaacaccttggcaaagccaaagtcagtcagcttcaggttgaagccctgcaacaaggcgttctcacatttgaggtcccggtgggccacaccacagccatggcagtagcggatggcctcaaccatctgacggaagagggccttggcccggctttcaggcagtggccccccattcagcacgcagtcaaagacatcccctccctcagcgagctccatcaccaggcagattttcccgtcggcagactccagcatctcatacacctggatgatgttcttgtggtccagggtacggacgatttggagctcccgagggaggaatctctggataaactatggaggactttctgctctccaatgggtaccagctgggcaagaccattggggaagggacctactcaaaagtcaaagaagcattttccaaaaaacaccaaagaaaagtggcaattaaagttatagacaagatgggagggccagaagagtttatccagagattcctccctcgggagctccaaatcgtccgtaccctggaccacaagaacatcatccaggtgtatgagatgctggagtctgccgacgggaaaatctgcctggtgatggagctcgctgagggaggggatgtctttgactgcgtgctgaatggggggccactgcctgaaagccgggccaaggccctcttccgtcagatggttgaggccatccgctactgccatggctgtggtgtggcccaccgggacctcaaatgtgagaacgccttgttgcagggcttcaacctgaagctgactgactttggctttgccaaggtgttgcccaagtcacaccgggagctgagccagaccttctgcggcagtacagcctatgctgcccccgaggtgctgcagggcattccccacgatagcaaaaaaggtgatgtctggagcatgggtgtggtcctgtatgtcatgctctgtgccagcctaccttttgacgacacagacatccccaagatgctgtggcagcagcagaagggggtgtccttccccactcatctgagcatctcggccgattgccaggacctgctcaagaggctcctggaacccgatatgatcctccggccttcaattgaagaagttagttggcatccatggctagcaagcacttgataaaagcaatggcaagtgctctccaataaagtagggggagaaagcaaacccaaaaaaaaaa

SEQ ID NO: 106 - DNA, 1668 bp, Homo sapiens
  CDS (402)..(1583)
ttaattctcattgaaatggaccaaattataaggtcctacaggagccagaggtaagttggccttactgtatgaactagatgggcccagctcaccagcatcttccttctctttccttgcaagagctgaataaggttgatccaccttctgcctacaggggagcaaactgttcactcgcctagggaatatggacacgggtttgaggctccagccccggatgacaacactccggaaatatgcgagcggcggcggaagcggaagtgcctcagcggtaggggccggggaagtgtctgtagcgtccctccctctcaaccacaataacaggcggagggtcggcgtaggtactttgaactcaagtaaacaaaagggaagattttctcgttgatactggagactgcacaacaatggggccacgaaagaaaagtgtgaaaacatgtatcatgaataatgaaattccagaagaaatgacagcagatgaaacaaaggactatatgaatcaactttcacatgaagtactttgccatatttttaggtacctccctctgcaggatatcatgtgtatggaatgtctttcccggaagctaaaggaagcagtgaccctatatctgcgagttgtgagagttgtagatctctgtgcagggcggtggtgggaatacatgccaagtggctttacagatgccagttttctaacactattaaagaagatgccagatgttgaacagctatatggccttcaccctcgataccttgagaggcgaagagtaaggggccatgaggcttttagcattccaggagtcctagaagctttgcaggcatgcccaaacttagtgggtgtggaaacttctcatttggagttggtagaatccatttggacatatatgccccatgttcatattttggggaaatttcgtaatcgtaatggagcttttccaattcctcctgaaaataaactgaaaattcctataggagccaaaattcaaactttacatttagttggggtgaatgttcctgaaattccttggatcccaatgctaaggcacctttatatgaagtgggtaagactcactaaaccacagccatttaaagacttcctttgtatcagcttaagaactttcgtcatgaggaactgtgcaggacccacaaattccttgaaatatgtccctttagtaacaggcttagcctctgcccgaaacttggaacacttagaaatggttcgagttcctttccttggaggtcttatccaacatgttgttgaagacagttggagatcaggtggttttagaaatttgcacactattgttctgggagcttgcaaaaatgctcttgaagtagatcttggttacctcaacattactgctgcccgtaggttacatgaagttcggatccagccttccctaaccaaagatggtgtcttttctgccctaaagatggcagagttggagtttccccagtttgaaacccttcatctaggatatgtagatgagtttttgctacagagtaagatttatcccattttaattcctagaattactgtaagaaatttacttgacaaactgaaatctgaattgggttgtgccatgtctttttgaacataagacaacttaaaatcttaggtgctctcacgtctcgaaaaataaacttttaaattaaaaaaatcaaaaaaaaaaaaaa

SEQ ID NO: 107 - DNA, 3252 bp, Homo sapiens; identical to SEQ ID NO: 87
  CDS (403)..(3249)

SEQ ID NO: 108 - DNA, 4446 bp, Homo sapiens
  CDS (260)..(3865)
tgatatccatccagatttccatgttgccttcaccccctcaaagattagctttccttcgtgtggtggcagttcacggagcacctttgggagtatccctcagtacctgacgaggagcccactgcctgggacaccagacttgctcccccggaaccgggagccctccaaggggctgtggcatggcgccctgacgccccagcttggacccgttgcctgcctttgccctggactcctgagtgtagagctcagcccaggagccagtatgggtcgtgaacaggacctgatcctcgccgtcaagaatggagatgtgaccggtgtgcagaaactggtggcgaaggtcaaggccacaaagacaaagctcctgggctccacaaagaggctcaacgtgaactaccaggatgctgatggattctctgccctccaccacgctgctttggggggcagcctggagctcatagccttgctgctagaggctcaggccactgttgacatcaaggacagcaatggcatgcgcccgctgcactacgcagcctggcagggccggctggagcctgtgaggctgctgctgcgcgcctctgcggctgtcaatgccgcctcgctggacggacagatccccctgcacctggctgcacagtatggacattatgaggtgtcagaaatgctcctccagcatcagtccaacccatgcctggtcaacaaggccaagaagacgcccctggacctggcctgtgaatttggccgactcaaggtggcccagctgcttctgaacagccacttatgtgtggcactgctggagggtgaggccaaagacccgtgtgaccccaactacaccacgcccctgcacttggctgccaagaatggccacagagaagtcatcaggcagctcctgagagctgggatcgagatcaaccgccagaccaagacgggtacggcgctccacgaggccgcactgtatggcaagaccgaggtggtgcggctgcttctggagggaggtgtggacgtgaacatccggaatacgtataaccagacggcgctggacatagtgaatcagttcaccacctcccaggccagccgggaaatcaagcagctactgcgggaggcctcagggatcctgaaggtccgagcgctcaaggatttctggaacctccacgatcccactgctctcaatgtccgggcaggggatgtcatcacggtgctagaacagcatcccgacggccgctggaagggccacatccacgagagccagaggggcacagaccgcataggctacttccccccgggcattgtcgaggtggtcagcaagcgggtgggcatccctgcagcccgcctcccctccgcacccacccccctgcgcccaggcttctcccggacaccgcagcctcctgccgaagaacccccgcaccctcttacctacagccagcttcctcgggtgggcctcagcccagacagcccagcaggtgacaggaatagtgtgggcagtgagggcagcgtgggcagcatccgcagtgccggcagcgggcagagctctgagggcactaatggccatggccctggcctcctgattgagaacgcccagccactgccctctgctggagaggaccaggtgctgccaggactccacccgccgtccctggcagacaacctgagccaccgccctctggccaactgccgctctggggagcagatcttcacccaggacgtgcggccagaacagctgctggaggggaaggacgcgcaggccattcataactggctaagcgagttccagctggagggctacactgcccactttctgcaggccggctatgatgtgcctaccatcagccgcatgacacctgaggacctgacggccatcggggtgaccaagcctgggcacaggaagaagatcgcctcagagatcgctcagctcagcatcgccgagtggctgcccagctacatcccaacggacctgctggagtggctgtgtgcactggggctgccacagtaccacaagcagctggtgagcagcggctacgactccatggggctggtggccgacctcacctgggaggagctgcaggagattggggtcaacaagctcgggcatcagaagaagctcatgctgggggtgaagcggctggcggagcttcggcggggcctgctgcagggggaggccctcagcgaaggcgggcgccggctggccaagggtccggagctgatggccatcgagggactggagaatggagaaggcccagctacagctggcccacggctcctcaccttccagggcagcgaactaagcccagagctacaggcggccatggcagggggtggccctgaaccactccccctcccacctgcccgctctcccagccaggagagcatcggggcacgctcacgggggtctggccactcacaggaacagcctgccccacagcccagcggtggagatcccagccccccccaggagaggaacctcccagagggcacagagcggccccctaagctttgttcttcacttcctggccaaggacccccaccctatgtttttatgtacccccagggctcaccctctagcccggccccagggccacctcctggcgcaccctgggccttctcctacttggccgggccccctgccactcccccagacccgcctcgacctaagcgccggtcccacagcctaagccgccctggccccacagagggggatgctgagggggaggccgaagggccagtgggcagcaccctaggcagttatgctacccttacccggcggccaggacgcagtgcccttgtccggaccagtcctagcgtgaccccaaccccagctcgggggactcctcgcagccagtcctttgccctgcgggcccggcgcaaaggccccccgcccccgccccccaagcgcctcagctccgtctctggccccagcccggagccacctccactagatgggagcccagggcccaaggaaggggccacagggccccgaaggcgaacactgagtgaacctgctggcccctcagagccccctggcccacctgccccggctgggcccgcgtcagacacggaggaggaggagccaggccctgaggggacgcccccatctcggggcagctctggggaagggctgccgtttgcagaggaagggaacctgaccatcaaacagcgcccgaagcccgctggccccccgccccgagagacacccgtgccccccggcctcgatttcaacctcacggaatcagacactgttaagcggaggcccaagtgccgggagagagagccactgcagaccgcactgctggccttcggagtggccagtgccacgcctggccccgctgccccactgccttccccaactcctggcgagtctcctccagcttctagccttccccagcccgagcccagcagccttccagcccaaggagttccaaccccccttgctcccagccccgccatgcagcctccagtgccgccctgcccagggccaggtctggaaagctcagcagctagtcggtggaatggggagacagaacccccggccgcccctgctgccctcctcaaggtgcccggagcaggaacagcccccaagcctgtgtcggtggcctgcacccagctggcattttctggccctaagctagcgccccggctcggcccccgcccagtgcctcctccacggcctgagagcactgggactgtgggcccaggccaggcccagcagagactggagcagaccagctcgtccctggcagctgcactgagagccgcagagaagagcattggcaccaaggagcaagagggcacccccagcgcctccaccaagcacattctggatgacatcagcaccatgttcgacgccctggctgaccagctggacgccatgctggactgagccctccagcagtgcccactgtgacctgccgaagtccactgcctttgccccagcacagaagaggcccctgccaccctagggacgggccaagggctggtcaggctgaagtgcccctcctagcagggccccttcccactcagcccgcggctgtgggcaccacagctcttgtggggcagcccaccttagaacctgactagcgagggacctccgctgcatctcagcaaagcccctcccagggtttgatcgattgagcaggacagccctgctcctggacagggaccctggtaagagctctctcctcagggaggaagtaggggtggggctttgggggtgctttctctgtaccccccagcccatgtcccaagttgtgccaagggaatgcctcttgccacccaccatcctgcccaggccctgagaggctggaggaggcgtgtgtctggccgggccccctctccgtaggtgtacagaggacatgtaaatacacagcggtggtgcccaggcagctcctgccccgccttccctcactgaggcggctagcaggggtgggaggcgtggggttaacgatccccaagtctaat

SEQ ID NO: 109 - DNA, 1574 bp, Homo sapiens
  CDS (192)..(1397)
gcgcactacgccggtgcccggtgcgagggcgtcaccggaagtgtcccgcggcgccccggatgcgaccgggcaacagcggttgccagggcgacgtgagctttccggagctgctggtactcccgattggagacgtagaaccgttacttgtcgagggccttagcggccgccgtgaccctctcggggatcccacgatgttcttctacctgagcaagaaaatttccattcccaataacgtgaagctgcagtgtgtatcctggaacaaggaacaagggttcatagcatgcggtggtgaagatggattactgaaagttttgaaattagagacgcagacagatgatgcaaaattgaggggccttgcagcccccagtaacctttctatgaatcagactcttgaaggtcatagtggttctgttcaagttgtaacatggaatgagcagtatcagaagttgactaccagtgatgaaaacgggcttatcattgtgtggatgttatataaaggctcttggattgaggagatgatcaacaatcgaaataaatcagttgttcgcagtatgagctggaatgctgacggacagaagatctgcattgtatatgaagatggggctgtgatagttggttcagtggatggcaatcgtatttggggaaaagacctgaagggtatacagctatcccatgtaacatggtctgcggacagtaaagtcttactttttggaatggcaaatggggaaatacacatttacgataatcaaggaaattttatgataaaaatgaaactgagttgtttggtgaatgtcactggagctatcagcattgctggaattcattggtaccatggcacagaaggctacgtggagcctgattgcccttgccttgctgtttgctttgataatggaagatgccaaataatgagacatgagaatgaccaaaatcccgttttgattgacactggcatgtacgtagtaggcatccagtggaaccacatgggcagcgtgttagctgtggcaggcttccagaaggcagccatgcaggacaaagatgtgaacattgtgcagttttacactccgtttggtgagcatctgggtactttgaaagttcctggaaaggaaatatctgcactatcttgggaaggaggtggactgaaaattgcactagctgttgattcctttatatattttgcaaacattcgacctaattataagtggggttattgctcaaacactgtagtttatgcatataccagacctgatcgtccagaatattgtgttgtcttctgggatacgaaaaacaatgaaaaatatgttaaatatgtgaagggtctcatttctattactacctgtggagatttctgcattttggctacaaaagctgatgaaaatcatcctcaggtaggtgtttcttgatatcttaagacatagctgggctaactgcttgggttatagttttctaccttttcaagcatggcctctacactggcaagtacatcaaaacattgggtctgttggcactattggtctagacccattttggaaaactctgtgactccattgatgctgtgtgccagattctttcttcgt

SEQ ID NO: 110 - DNA, 1507 bp, Homo sapiens
  CDS (1)..(873)
atggggaagggagatgtcttagaggcagcaccaaccaccacagcctaccattccctcatggatgaatatggttatgaggtgggcaaggccattggccatggctcctatgggtcggtatatgaggctttctacacaaagcagaaggttatggtggcagtcaagatcatctcaaagaagaaggcctctgatgactatcttaacaagttcctgccccgtgaaatacaggtaatgaaagtcttgcggcacaagtacctcatcaacttctatcgggccattgagagcacatctcgagtatacatcattctggaactggctcagggtggtgatgtccttgaatggatccagcgctacggggcctgctctgagccccttgctggcaagtggttctcccagctgaccctgggcattgcctacctgcacagcaagagcatcgtgcaccgggacttaaagttggagaacctgttgctggacaagtgggagaatgtgaagatatcagactttggccttgccaagatggtgccttctaaccagcctgtgggttgtagcccttcttaccgccaagtgaactgcttttcccacctcagccagacttactgtggcagctttgcttacgcttgcccagagatcttacgaggcttgccctacaaccctttcctgtctgacacctggagcatgggcgtcatcctttacactctagtggtcgcccatctgccctttgatgacaccaatctcaaaaagctgctaagagagactcagaaggaggtcactttcccagctaaccataccatctcccaggagtgcaaggtccaactgctcattgcctgtgtggcacaatggagaaaaactcaggcaagacctctctctcccctgctctagaacctgatcctccagatgctacgccaagccactaagcgtgccaccattctggacatcatcaaggattcctgggtgctcaagttccagcctgagcaacccacccatgagatcaggctgcttgaggccatgtgccagctccacaacaccactaaacagcaccaatccttgcaaattacgacctgaaaatggctgagggagggggctaagagaggagcaaagcaggaggtcttgggctaaaaatcttttttaccaaaaataaatctaagtctgatttagtttcatcaactagggtcaaagacattcttttctcaagtcaatcttatagcagggaacactgctggagtaagagatagatttctgcccagagcctgtaaccaataatcttgacactgtgttaaatcaatagtgtaattcatgatgtggctcttaggggatggggtgctcagattaacgctctattttgggaagctttattattcaactcaacatatgctcattattttacatctttgtgctgtttaaatgctcaagtagtggggtataagccctggttcttccactttgattatggctctgcctgtctatagtccaaagtaatggcactgttagttcttttagaaatgggtattcg

SEQ ID NO: 111 - DNA, 1022 bp, Homo sapiens
  CDS (73)..(816)
cgcagcatttcagggactggatgaggagcttacggttttttacagaatcatcagtatcttggaagaaaaagaatgttaagaaataacaaaacaataattattaagtactttcttaatctcattaatggagctttcttggttcttggacttttattcatgggatttggtgcatggctcttattagatagaaataattttttaacagcttttgatgaaaataatcacttcatagtacctatttctcaaattttgattggaatgggatcttctactgttcttttttgtctattgggttatataggaattcacaacgaaatcagatggctcctaattgtgtatgcagtattgataacatggacctttgctgttcaggttgtactttcagcattcatcatcacaaagaaagaggaggttcagcaactatggcatgacaaaattgattttgtcatttctgagtatggatctaaagataagcctgaagatataaccaagtggactattctgaatgccttacagaaaacattacagtgttgtggccaacataattacacagactggataaagaataagaacaaagaaaattcaggacaggtgccatgttcttgcacaaagtcaactttaagaaaatggttttgtgatgagccactgaatgcaacttaccttgagggttgtgaaaataaaatcagtgcatggtataatgttaatgtgttaaccttaatcggaattaactttggacttttaacttcagaggttttccaagtctcattaacagtttgtttcttcaaaaacatcaagaatataatccatgcagaaatgtgacctttggatttcaatttgttcagaagaaaccagttaattcttaaaaaatcacattatattattttattccaaaaacgttttgaattgtattaaataacagatgtattcaaattattaattatatgtaatattgaattactgaatactataataaaacattcatgaaattataaagtcaaaacaagaggacgaatatactaaac

SEQ ID NO: 112 - DNA, 4405 bp, Homo sapiens
  CDS (143)..(3700)
gcctgactgctcggttaggacctcggagagcgccaggcgccgcgaccagagggcccagagaagcggccggagcccgcctacctcggccccctcagcttcccgggctggcaggcggctagaggcgtctgaggaagtgtttaaaatgaagaagtttaatttccgaaaagttttggatggcttaactgcctcctcccctggcagtggtagcagcagtggcagtaacagtggtggtggggctggaagtggttccgtacatccggcggggactgcaggggttctcagagaggaaattcaggaaactttgacttcggagtatttccagatttgcaagacagttcggcatggttttcctcatcagcccacagcattagcctttgatccagttcagaaaatcttggctattgggacgagaacaggtgctatacgaatactcgggagacctggtgttgattgctattgccaacatgaaagtggtgcagctgtcctacagctccaatttttgatcaatgagggtgccttggtcagtgcaagttcagatgatacacttcatttgtggaaccttagacaaaaaaggccagccatactccattctcttaaatttaaccgggaacgaattacttactgtcatctacctttccagagtaaatggctttatgttggaacagaaagaggaaatacacatattgtaaatattgaatctttcattctttctggatatgttatcatgtggaacaaggcaattgaactatccactaagactcatccaggtccagttgtacatttaagcgatagcccaagagatgaaggcaaactgctaataggttatgaaaatggtactgtagtattctgggacttgaaatctaaaagagcagaactgagagtttattatgatgaggctattcattcaattgattggcatcatgagggcaaacagttcatgtgcagccattcagatggtagtttgactttatggaacctgaaaagcccaagtcgccctttccagaccacaattccacatggaaaaagtcaaagagaaggaagaaaatctgaatcttgtaaaccaattcttaaagtagaatacaagacctgcaaaaacagcgaaccattcataatattctctggtgggctgtcctatgacaaagcttgtagaagaccaagtttaaccatcatgcatggaaaagcaattacagtacttgaaatggatcatcctattgttgaatttctaactttatgtgaaacgccctatccaaatgaatttcaagaaccctatgctgtcgtggtacttctggagaaagatctcattgtagttgatctgacacaaagcaattttccaatctttgaaaatccatatcccatggacattcatgaatcaccagttacatgcacagcatactttgcagattgtcctccggatttgattctagtactgtattctataggagtcaagcataaaaaacaaggatacagtaataaggagtggccaatcagtggaggagcttggaaccttggagcacaaacatatccagaaattattattactggtcatgcagatggatcaataaaattttgggatgcttctgcaataactctgcagatgctgtacaagctaaaaacttcaaaagtgtttgaaaaacagaaggtaggagaaggaaaacaaacatgtgaaattgtagaggaagacccatttgccattcagatgatttactggtgtccagagagcagaatattctgtgtatcaggagtctctgcatatgtcataatttataaattcagcagacatgaaattacaacagaaatagtgtcattagaggtacgacttcagtatgatgttgaagatattattacccctgaaccagaaacaagtcctccgtttccagatctctcagcccagcttccttcttcaaggagtctttctgggagcactaacactgttgctagtgaaggagtaacaaaggacagtattccatgcctcaatgtgaagacacggccagtgcgaatgcctccaggatatcaagcagaacttgttattcaattggtgtgggtagatggtgaacctccacaacagattactagtcttgctgtaagctcagcatatggaatagttgcatttgggaactgcaatgggttggctgtggtggattttatacagaagacagtactgttaagcatggggaccattgacctatatagatcaagtgacttataccagcgacaaccacggtctcctcgaaaaaacaaacagttcattgcagacaacttttgcatgcgtggcctgtctaacttttatcctgatttaacgaaacggatccgtacttcctatcagagtttaactgaactgaatgacagtccagttcccctagaacttgagcgctgcaagtctcctacctcagaccatgtaaatggacactgcacaagtccaacttctcagagttgcagttctggaaaacgtctttctagtgccgatgtttcaaaagtaaatcgctggggtcctggaagaccaccatttcgaaaggcccagtcagcagcctgcatggagatttctttaccagttacaacagaagaaaaccgagaaaattcctataatcgttctagaagctctagtatctccagtattgacaaagattctaaagaagcaattacagcactatacttcatggactcctttgcacggaaaaatgactctaccatctctccttgtctgttcgttggaaccagtctgggaatggtgttaatcatctccttaaacctaccattagcagatgaacaaaggtttacagagccagtcatggtattgccaagtggtacattcctctcattgaaaggagctgtgctaacattctcctgtatggaccgaatgggtggattaatgcaaccgccatatgaagtttggagggatccaaacaacatagatgaaaatgaaaaatcttggagaaggaaagtggtaatgaactcatcttctgcatcccaagaaataggagatcatcagtatacaataatctgctcagaaaaacaagccaaagtcttctcactgccttctcagacttgcctttatgttcataacatcacggagacatcttttatactgcaagcaaatgtggtggtcatgtgtagcagtgcctgcttggcatgcttttgtgctaacggacatatcatgataatgagcctacctagtcttcgcccaatgttggatgttaattatttgccactgacagacatgaggatagcacgaacattttgttttaccaatgaaggacaggcattatacctcgtctctcctactgaaattcagcggttaacatacagccaagaaatgtgtgataatctacaggacatgctaggagatttgtttactcccatagagacaccagaagctcaaaacagaggctttctcaagggactgtttggtggaagcggacaaacatttgacagagaagagctctttggggaagcttcggcaggaaaagcatcccgcagccttgcgcaacacattcctggaccaggtagtatagaagggatgaaaggcgctgctggaggggtgatgggagagctgacccgtgcacggattgcacttgatgaaagaggacagaggctaggagagctggaagagaaaactgcaggcatgatgaccagtgcagaagcattttccaaacatgcacatgagttaatgctgaaatacaaggataagaaatggtaccaattctgacttctaaagaagctgtgactgctttgagaaatcatattcagggaaaccaaatttattcccagcatcactattcaactgctagaagccagtttcttctacaaaatgttccatttacagtcaatctgaaattttcataaaagagatgtatcagagacactgtgcaacccaaaggctggagccctggttaaaatcccaaaatacggctgaatttgccttttcccatgtggaatggagctatcatcttggcatgtcattcgataaggatttatatttagtaactacggggagtcctcttgatttgaaaattcctgtacaaacaaaagcattaatgcacttaatgaaaaaaaatctttgcatgataaattaacatcttaaggggaaaagaaaaaaaagcatgttgtgatagaagaaaaaaagattcatggtaaactatttctatcaattgggccacactcaacaatttaaaaaatctgcatttgaagatgtcagtgcatttcaaatatatttgccatacccaactgaaacggaaaacaaaacaaaacaagaacccagagttttctcctcatctgtaactttcattgtactagaaccttattgaattcttatggcaagagtctgattaatgttctctctccatgttttacatcattcacagttgtgtcaaaatcaaatattgccagtatagtaaattattcccaacac

SEQ ID NO: 113 - DNA, 1808 bp, Homo sapiens
  CDS (93)..(1676)
tcccctgctcgggtcggagccccgccagttcctccgaccccctactgctcggccgcggctgcccgcgcccccatccgcagctcctcgcccggatgcctctccccgggggactatggtggcttctctgctgccgtcgaggcttcactcttctgcaccgggactacggggacggcgagcttagcggggacggggacgaggacgaggacgaggaaacctttgagctgcggaccccgagtccagcgggcggcgggaggggtcccctggaagtgacgctgactcagccagtgaggagcgggcctgtctccaacaggctgcagagctgggaggagacttggagcctcatcccggagaaagggctgccggaggacgacccggacatcgttgtgaaaggttggctgtaccgggagccccgcggaggaggggcgcggccctggctgcccccgcgccgagcctggtttgtgctcacgcgggactccctggatcagttcagcagcagcgggaaaggggcgcggcgtctcgggagcctcgtgctcaccagcctgtgctcggtgaccggcccagagcgcaggcgtaaggagacaggtctgtggtcagtgactgtgtctggtcggaaacacagtgtccgcctctgctccccacgccaggcagaggctgagcgctggggggtggcattgcgggaagtgatcgcctccaaggcacccctggagacccccacccagctactgctcagggacatacaggaaagttgcggggacccagaggccgttgccctcatttacctgaggaacccgattctgagacacactagtggagccttgtatgccccactcctgcccctgccctatggagtcagcgccccaggtccgggctatgcacccctgcgcgaggaggcggtgcggctgttcttggcgctgcaggcgctggagggggcgcggcgccccgggcccttgatgcagggtgtgctccaaacctgccgggacttgcccgcgctccgggatgaactcttcctgcagctggctaagcagacctcgggccctgcaggtccccccgggctcccggctacccaagaccctgcggccctgcggtactggcaactcctcacctgcatgagctgcaccttccgacctgggggagctgtgcgggggcacctcctggggcacttggagaggaccgagcaggcactcccggactcggaactggcggaatatgcgcgcttcatccggaaagcgctgggccggacgcgcggcagagagctggtgccctcgctggcggagatttccgcgttgagccaacggcaggagctgctgtgtaccgtgcactgtccgggggctggtgcctgtgctgtggccatcgactcccacaccacggcgggggaggtggctcgagagctggtggggcggctgggcttggcccggagccgcaacgcattcgcgctgtacgagcagcgaggggcccaggagcgagccctggctggggggaccctcgtggccgacgtgctcaccagcttggccgcggaggaagctgggttggaggactcgcccgactccgggtggagactatgtctgcgtcttcacggacctctgcaccctgaggggctgtccccagacggtcacgaactgccaagaggtcacgacttccctcctgcctgcagcctgggccaggactgctctgagatttgagggaaacatggacccttttggccctgcagggacagggcacatcccacacccaagggctacaatgggtgtgggtaattttctagtttgtttcttaatttatttgtagaagagaagcaaaaaaaaaaaaaa

SEQ ID NO: 114 - DNA, 2925 bp, Homo sapiens
  CDS (635)..(2404)
actctatgtctcctctcgttggattgtgacaccgggaggtcagggaactccaggaccttgttctctgctggattcgcagcaaccagcacagcacgtagggcgtagttggtgctggatggatgtttgttgaatgaatgaatgatgaatggctggcaccttgtctgctcatccctaactcctgttccttcatctgtgcagccctaatctttgtttcctcatctgtccatccctttatttgtgcatcctcattcttagccccttcactgcccttctccatctcttcctccttgttcatttgtccctgttctctgtcctctactccactcatgcccatctctgtccccttgacttacccagtccctgctactatctccatccctaatttctgccctcttgtctgtctactcctaattccttttccttgtccatccctaatacctgtcaccttgtccttcttcctcgaatctccatccctaatccatctgcccctaatctctgtcccctttgcccatccttccttttctcggtgtctctttccacccttatctccacacctgcccaccctgcactcccattctgtttcccatctgcacccttgccccatccctcccacgcacaggaccagacggccaccatgtcaggagactatgaggatgacctctgccggcgggcactcatcctggtctcggacctctgtgcgcgggtccgagatgctgacaccaacgacaggtgccaggagttcaatgaccgaatccgaggctatccccggggtccagatgcagacatctccgtgagcctgctgtcggtcatcgtgacattctgtggcattgtccttctgggtgtctctctcttcgtgtcctggaagttgtgctgggtgccctggcgggacaagggaggctcggcagtgggcggtggccccctgcgcaaagacctaggccctggtgtcgggctggcaggcctggtaggcggaggcgggcaccacctggcggctggcctgggtggccatcctctgctgggcggcccacaccaccatgcccatgccgcccaccatccaccctttgctgagctgctggagccaggcagcctggggggttctgacacccctgagccctcctacttggacatggactcgtatccagaggctgcagcagcagcagtggccgctggggtcaaaccgagccaaacatcccctgagctgccctctgaggggggagcaggctctgggttgctcctgctgccccccagtggtgggggcttgcccagtgcccagtcacatcagcaggtcacaagcctggcacccactaccaggtacccagccctgccccgacccctcacccagcagactctgacctcccagccggaccccagcagtgaggagcgcccacctgccctgcccttacccctgcctggaggcgaggaaaaagccaaactcattgggcagattaagccagagctgtaccaggggactggccctggtggccggcggagcggtgggggcccaggctctggagaggcaggcacaggggcaccctgtggccgtatcagcttcgccctgcggtacctctatggctcggaccagctggtggtgaggatcctgcaggccctggacctccctgccaaggactccaacggcttctcagacccctacgtcaagatctacctgctgcctgaccgcaagaaaaagtttcagaccaaggtgcacaggaagaccctgaaccccgtcttcaatgagacgtttcaattctcggtgcccctggccgagctggcccaacgcaaactgcacttcagcgtctatgactttgaccgcttctcgcggcacgacctcatcggccaggtggtgctggacaacctcctggagctggccgagcagccccctgaccgcccgctctggagggacatcgtggagggcggctcggaaaaagcagatcttggggagctcaacttctcactctgctacctccccacggccgggcgcctcaccgtgaccatcatcaaagcctctaacctcaaagcgatggacctcactggcttctcagacccctacgtgaaggcctccctgatcagcgaggggcggcgtctgaagaagcggaaaacctccatcaagaagaacacgctgaaccccacctataatgaggcgctggtgttcgacgtggcccccgagagcgtggagaacgtggggctcagcatcgccgtggtggactacgactgcatcgggcacaacgaggtgatcggcgtgtgccgtgtgggccccgacgctgccgacccgcacggccgcgagcactgggcagagatgctggccaatccccgcaagcccgtggagcactggcatcagctagtggaggaaaagactgtgaccagcttcacaaaaggcagcaaaggactatcagagaaagagaactccgagtgaggggtctggcctaggcccgggatcggaccaggctccctcaggaccccatcctttcctgcccggaccgtgaattcatctccttgaagccataacgtccgagctgctggtgcggggcagccctggccctaggcttcctaaccctggaagcgagaggatgagaggaggccggcccagctccttctttcagggtgggggtcattcagcctccactgtgtctgtcttttcttccctggggctccccctcgaggcgaggggccatgcatgtctgggggacccctgccccccaaaaccctctgtctgtctctgtctctttgctgtttgtccaagactcagtgtcccgacccttgttctcgccgtgaatgtcaatgggccaatcctctctgtcctttcagacacacacacacctgtgtccaccccttctgttcgccacaccctgcgtctggccggtccccccactgctgctgctatcaacgccagaataaacacactctgtgggtctcactccaaaaaaaaaaaaa

SEQ ID NO: 115 - DNA, 8129 bp, Homo sapiens
  CDS (618)..(7913)
atgctcattcaggacagccagtttgctgttcacagttctagcctcaaactctcaagaccacatttagaaggtgaccaaagtggacttgaaggtcgtgggacagccctaggataccaaaaggaaactcggcactgggcatgttcggatgtgaatggttttgctgataagcaacagcctccggaaccaaagcctcaaaatagtcgtctcccccgcccctcgcagaagcggcgagtggtatctgccaaacagatgacaaagtacctccgactgaatcccacagacagcgctttgagcagaacgcacggctcaactcatgtaattactgtttatagctggccgagcctgactaggagagggcagacccgagaggaaatcagtttcccggacctttgagaggaggctgtgtgttaattaaaggctaggacgggacgggtacttctcagacatgctccaagttgttcttgagatcacagttcccatcacattttctctggagggagtgagtagataattgggattttttttttatttttggccttggctttcttccttttttttacctctccccattttagtcatatggccttgaacccacagtgaattgaagagagaaagaaatggatatgtctgaccccaatttttggactgtgctctcaaactttactttgcctcatttgaggagtgggaacaggcttcggcgaacacaaagttgccgaacaagcaaccggaaaagcttaataggcaatgggcagtcaccagcattgcctcgaccacactcacctctctctgctcatgcaggaaatagccctcaagatagtccaagaaatttctcccccagtgcctcagcccatttttcatttgcacggagaaatgacaggactgatggacgccgctggtcgttggcttctctcccttcctctggctatgggacaaacacacccagctctacggtctcttcatcctgttcctcccaggagaagttgcatcagttaccataccaaccaacaccagacgagttacacttcttatcaaaacatttctgtaccaccgaaagcatcgccactgagaacagatgcaggaacacgccgatgcgcccccgttcccgaagtctgagccctggacgttctcccgcctgctgtgaccatgaaataattatgatgaaccatgtctacaaagaaaggttcccaaaggctacagctcagatggaagaacgtctaaaggaaattatcaccagctactctcctgacaacgttctacccttagcagatggagtgcttagtttcactcaccaccagattattgaactggctcgagattgcttggataaatcccaccagggcctcatcacctcacgatacttccttgaattacagcacaaattagataagttgctacaggaggctcatgatcgttcagaaagtggagaattggcatttattaaacaactagttcgaaagatcctaattgttattgcccgccctgctcggttattagagtgcctggaatttgatccggaagaattttactacctattggaagcagcagaaggccatgccaaagaaggacagggtattaaaaccgacattcccaggtacatcattagccaactgggactcaataaggatcccttggaagaaatggctcatttgggaaactacgatagtgggacagcagaaacaccagaaacagatgaatcagtgagtagctctaatgcctccctgaaacttcgaaggaaacctcgggaaagtgattttgaaacgattaaattgattagcaatggagcctatggggcagtctactttgttcggcataaagaatcccggcagaggtttgccatgaagaagattaataaacagaacctcatccttcgaaaccagatccagcaggcctttgtggagcgggatatcctgacttttgcagaaaacccctttgttgtcagcatgtattgctcctttgaaacaaggcgccacttgtgcatggtcatggaatatgtggaagggggagactgtgctactttaatgaaaaacatgggtcctctccctgttgatatggccagaatgtactttgctgagacggtcttggccttggaatatttacataattatggaattgtacacagggatttgaaaccagacaacttgttggttacctccatggggcacataaagctgacagattttggattatctaaggtgggactaatgagcatgactaccaacctttacgagggtcatattgagaaggatgctagagagttcctggataaacaggtctgtggcacacctgaatacattgcaccagaagtgattctgaggcagggttatggaaagccggtggactggtgggccatggggattatcctctatgaatttctggttggatgcgtgccattctttggggatactccagaggagctatttggacaagtcatcagtgatgagatcaactggcctgagaaggatgaggcacccccacctgatgcccaggatctgattaccttactcctcaggcagaatcccctggagaggctgggaacaggtggtgcatatgaagtcaaacagcatcgattcttccgttctttagactggaacagtttgctgagacagaaggcagaatttattccccaactggaatctgaggatgacacaagttattttgatactcggtctgagaagtatcatcatatggaaacggaggaagaagatgacacaaatgatgaagactttaatgtggaaataaggcagttttcttcatgttcacacaggttttcaaaagttttcagcagtatagatcgaatcactcagaattcagcagaagagaaggaagactctgtggacaaaaccaaaagcaccaccttgccatccacagaaacactgagctggagttcagaatattctgaaatgcaacagctatcaacatccaactcttcagatactgaaagcaacagacataaactcagttctggcctacttcccaaactggctatttcaacagagggagagcaagatgaagctgcctcctgccctggagacccccatgaggagccaggaaagccagcccttcctcctgaagagtgtgcccaggaggagcctgaggtcaccaccccagccagcaccatcagcagctccaccctgtcagttggcagtttttcagagcacttggatcagataaatggacgaagcgagtgtgtggacagtacagataattcctcaaagccatccagtgaacccgcttctcacatggctcggcagcgattagaaagcacagaaaaaaagaaaatctcggggaaagtcacaaagtccctctctgccagtgctctttccctcatgatcccaggagatatgtttgctgtttcccctctgggaagtccaatgtctccccattccctgtcctcggacccttcttcttcacgagattcctctcccagccgagattcctcagcagcttctgccagtccacatcagccgattgtgatccacagttcggggaagaactacggctttaccatccgagccatccgggtgtatgtgggagacagtgacatctatacagtgcaccatatcgtctggaatgtagaagaaggaagtccggcatgccaggcaggactgaaggctggagatcttatcactcacatcaatggagaaccagtgcatggacttgtccacacagaagttatagaactcctactgaagagtgggaataaggtgtcaatcactactaccccatttgaaaacacatcaatcaaaactggaccagccaggagaaacagctataagagccggatggtgaggcggagcaagaaatccaagaagaaagaaagtctcgaaaggaggagatctcttttcaaaaagctagccaagcagccttctcctttactccacaccagccgaagtttctcctgcttgaacagatccctgtcatcgggtgagagcctcccaggttcccccactcatagcttgtctccccggtctccaacaccaagctaccgctccacccctgacttcccatctggtactaattcctcccagagcagctcccctagttctagtgcccccaattccccagcagggtccgggcacatccggcccagcactctccacggtcttgcacccaaactcggcgggcagcggtaccggtccggaaggcgaaagtccgccggcaacatcccactgtccccgctggcccggacgccctctccaaccccgcaacccacctccccgcagcggtcaccatcccctcttctgggacactcactgggcaattccaagatcgcgcaagcctttcccagcaagatgcactccccgcccaccatcgtcagacacatcgtgaggcccaagagtgcggagccccccaggtccccgctgctcaagcgcgtgcagtccgaggagaagctgtcgccctcttacggcagtgacaagaagcacctgtgctcccgcaagcacagcctggaggtgacccaagaggaggtgcagcgggagcagtcccagcgggaggcgccgctgcagagcctggatgagaacgtgtgcgacgtgccgccgctcagccgcgcccggccagtggagcaaggctgcctgaaacgcccagtctcccggaaggtgggccgccaggagtctgtggacgacctggaccgcgacaagctgaaggccaaggtggtggtgaagaaagcagacggcttcccagagaaacaggaatcccaccagaaatcccatggacccgggagtgatttggaaaactttgctctgtttaagctggaagagagagagaagaaagtctatccgaaggctgtggaaaggtcaagtacttttgaaaacaaagcgtctatgcaggaggcgccaccgctgggcagcctgctgaaggatgctcttcacaagcaggccagcgtgcgcgccagcgagggtgcgatgtcggatggcccggtgcctgcggagcaccgccagggtggcggggacttcagacgggcccccgctcctggcaccctccaggatggtctctgccactccctcgacaggggcatctctgggaagggggaaggcacggagaagtcctcccaggccaaggagcttctccgatgtgaaaagttagacagcaagctggccaacatcgattacctccgaaagaaaatgtcacttgaggacaaagaggacaacctctgccctgtgctgaagcccaagatgacagctggctcccacgaatgcctgccagggaacccagtccgacccacgggtgggcagcaggagcccccgccggcttctgagagccgagcttttgtcagcagcacccatgcagctcagatgagtgccgtctcttttgttcccctcaaggccttaacaggccgggtggacagtggaacggagaagcctggcttggttgctcctgagtcccctgttaggaagagcccctccgagtataagctggaaggtaggtctgtctcatgcctggagccgatcgagggcactctggacattgctctcctgtccggacctcaggcctccaagacagaactgccttccccagagtctgcacagagccccagcccaagtggtgacgtgagggcctctgtgccaccagttctccccagcagcagtgggaaaaagaacgataccaccagtgcaagagagctttctccttccagcttaaagatgaataaatcctacctgctggagccttggttcctgccccccagccgaggtctccagaattcaccagcagtttccctgcctgacccagagttcaagagggacaggaaaggtccccatcctactgccaggagccctggaacagtcatggaaagcaatccccaacagagagagggcagctcccctaaacaccaagaccacaccactgaccccaagcttctgacctgcctggggcagaacctccacagccctgacctggccaggccacgctgcccgctcccacctgaagcttccccctcaagggagaagccaggcctgagggaatcgtctgaaagaggccctcccacagccagaagcgagcgctctgctgcgagggctgacacatgcagagagccctccatggaactgtgctttccagaaactgcgaaaaccagtgacaactccaaaaatctcctctctgtgggaaggacccacccagatttctatacacagacccaggccatggagaaagcatgggcgccgggtgggaaaacgaaccacaaagatggcccaggtgaggcgaggcccccgcccagagacaactcctctctgcactcagctggaattccctgtgagaaggagctgggcaaggtgaggcgtggcgtggaacccaagcccgaagcgcttcttgccaggcggtctctgcagccacctggaattgagagtgagaagagtgaaaagctctccagtttcccatctttgcagaaagatggtgccaaggaacctgaaaggaaggagcagcctctacaaaggcatcccagcagcatccctccgccccctctgacggccaaagacctgtccagcccggctgccaggcagcattgcagttccccaagccacgcttctggcagagagccgggggccaagcccagcactgcagagcccagctcgagcccccaggaccctcccaagcctgttgctgcgcacagtgaaagcagcagccacaagccccggcctggccctgacccgggccctccaaagactaagcaccccgaccggtccctctcctctcagaaaccaagtgtcggggccacaaagggcaaagagcctgccactcagtccctcggtggctctagcagagaggggaagggccacagtaagagtgggccggatgtgtttcctgctaccccaggctcccagaacaaagccagcgatgggattggccagggagaaggtgggccctctgtcccactgcacactgacagggctcctctagacgccaagccacaacccaccagtggtgggcggcccctggaggtgctggagaagcctgtgcatttgccaaggccgggacacccagggcctagtgagccagcggaccagaaactgtccgctgttggtgaaaagcaaaccctgtctccaaagcaccccaaaccatccactgtgaaagattgccccaccctgtgcaaacagacagacaacagacagacagacaaaagcccgagtcagccggccgccaacaccgacagaagggcggaagggaagaaatgcactgaagcactttatgctccagcagagggcgacaagctcgaggccggcctttcctttgtgcatagcgagaaccggttgaaaggcgcggagcggccagccgcgggggtggggaagggcttccctgaggccagagggaaagggcccggtccccagaagccaccgacggaggcagacaagcccaatggcatgaaacggtccccctcagccactgggcagagttctttccgatccacggccctcccggaaaagtctctgagctgctcctccagcttccctgaaaccagggccggagttagagaggcctctgcagccagcagcgacacctcttctgccaaggccgccgggggcatgctggagcttccagcccccagcaacagggaccataggaaggctcagcctgccggggagggccgaacccacatgacaaagagtgactccctgccctccttccgggtctccaccctgcctctggagtcacaccaccccgacccaaacaccatgggcggggccagccaccgggacagggctctctcggtgactgccaccgtaggggaaaccaaagggaaggaccctgccccagcccagcctcccccagctaggaaacagaacgtgggcagagacgtgaccaagccatccccagccccaaacactgaccgccccatctctctttctaatgagaaggactttgtggtacggcagaggcgggggaaagagagtttgcgtagcagccctcacaaaaaggccttgtaacggggagggcccaggggcaggactgtggagacccgtcctgaacgggcgactgtgtcttgactacctttcaaaaccagcactgtgtgggaatgtccgccaggcagagctcggagcctcattgagacaggggagagagaaagacaaagaggggaccttcttccagatgccttcccagttgtaaccggtaaaactgttaccagatagtgtttgtac

SEQ ID NO: 116 - DNA, 1591 bp, Homo sapiens
  CDS (710)..(1588)
gtatatgatggtcacacaggatttaaggctacacttatgagttttgggccctatttctatgtctgtttcattcccattctcctgtactcactaaacaccaaggggtatggcaacccctacccctgctttccctccactcccccaaagttcccatttggccagccccgtgagagaagccagccccagccccaacctctcctccctctcccttggttctgcagggcagtcctcgcctgctgggaagggttaacaaggagtgtttgtagcagccgctgtctccaaggagaggggaggaaagcagagtggggaggccggcagccaccccaggctctgtggccgcagccagcagagggtaggaggcagccagcttgatctctccagctctggggaaagagaggagtgtcctcacttccatctggcctcagaggggtgaactccaagtggactgggcagcctgagagcaaggttgctgcagggccaccagggaaagctctggcaaggactgaggaatgtgggggggcaggggctgggccaggcctggcagctgaagccagtggcaagtagcagcactggaggtcccgggctctcagcgagtacacgggaacctcagaatcaggaagaacccagccgagacccagcagcagcgggaggaaagaggcggcagtgggagaggggaggtgcccacctcctgccctgctggggtccagccatgtcccagcctgcgggaggcaggaggaagcccaggaccctagggccgcctgtgtgcagtatccggcctttcaagtcgagtgagcagtacctggaggccatgaaggaagacctggctgagtggcttcgcgacctctatgggctggacatcgacgcagccaacttcctgcaggtgctggaaacgggcctggtgctgtgccaacacgccaacgttgtcactgacgctgccctggccttcctggctgaggcacctgcccaagcccagaagattcccatgccccgggtcggggtctcctgcaatggggccgcccagccaggtaccttccaggccagggacaatgtctctaacttcatccagtggtgtcgaaaggagatgggcatccaagaggtgctgatgttcgagacggaggacttggtgctgcgcaagaacgtgaagaacgtggtgctgtgtttgctggagctgggccgccgggcgtggcgctttggtgttgcggcgcccacactcgtgcagctggaggaggagatcgaggaggaggtgcggcgggagctggccctgcccccgcccgacccctcgccgccagcgccccccaggcgccagccctgccacttccgcaacctggaccagatggtgcagagccttgtgagccactgcacgtgcccagtgcagttctccatggtcaaagtgtctgaggggaagtaccgtgtgggtgactccaacaccctcatcttcatccggatcctccggaaccatgtgatggtacgtgtagggggcggctgggacacactgggccattacctggacaaacatgacccctgccgctgcacatccctctgtgagtcccctgagggccctctccctgtggggttggttgaagaggcctag

SEQ ID NO: 117 - DNA, 5044 bp, Homo sapiens
  CDS (10)..(4956)
agcgctgccatggctgggggccgtggggcccccgggcgcggccgggacgagcctccggagagctacccgcaacgacaggaccacgagctacaggccctggaggccatttacggcgcggacttccaagacctgcggccggacgcttgcggaccggtcaaagagccccctgaaatcaatttagttttgtaccctcaaggcctaactggtgaagaagtatatgtaaaagtggatttgagggttaaatgcccacctacctatccagatgtagttcctgaaatagagttaaaaaatgccaaaggtctatcaaatgaaagtgtcaatttgttaaaatctcgcctagaagaactggccaagaaacactgtggggaggtgatgatctttgaactggcttaccacgtgcagtcatttctcagcgagcataacaagccccctcccaagtcttttcatgaagaaatgctggaaaggcgggctcaggaggagcagcagaggctgttggaggccaagcggaaagaagagcaggagcaacgtgaaatcctgcatgagattcagagaaggaaagaagagataaaagaagagaaaaaaaggaaagaaatggctaagcaggaacgtttggaaattgctagtttgtcaaaccaagatcatacctctaagaaggacccaggaggacacagaacggctgccattctacatggaggctctcctgactttgtaggaaatggtaaacatcgggcaaactcctcaggaaggtctaggcgagaacgtcagtattctgtatgtaatagtgaagattctcctggctcttgtgaaattctgtatttcaatatggggagtcctgatcagctcatggtgcacaaagggaaatgtattggcagtgatgaacaacttggaaaattagtctacaatgctttggaaacagccactggtggctttgtcttgttgtatgagtgggtccttcagtggcagaaaaaaatgggtccattccttaccagtcaagaaaaagagaagattgataagtgcaaaaagcagattcaaggaacagaaacagaattcaactcactggtaaaattgagccatccaaatgtagtacgctaccttgcaatgaatctcaaagagcaagacgactccatcgtggtggacattttagtggagcacattagtggggtctctcttgctgcacacctgagccactcaggccccatccctgtgcatcagcttcgcaggtacacagctcagctcctgtcaggccttgattatctgcacagcaattctgtggtgcataaggtcctgagtgcatctaatgtcttggtggatgcagaaggcaccgtcaagattacggactatagcatttctaagcgcctcgcagacatttgcaaggaggatgtgtttgagcaaacccgagttcgttttagtgacaatgctctgccttataaaacggggaagaaaggagatgtttggcgtcttggccttctgctgctgtccctcagccaaggacaggaatgtggagagtaccctgtgaccatccctagtgacttaccagctgactttcaagattttctaaagaaatgtgtgtgcttggatgacaaggaaagatggagtccccagcagttgttgaaacacagctttataaatccccagccaaaaatgcctctagtggaacaaagtcctgaagattctggaggacaagattatgttgagactgttattcctagcaaccggctacccagtgctgccttctttagtgagacacagagacagttttcccgatacttcattgagtttgaagaattacaacttcttggtaaaggagcttttggagctgtcatcaaggtgcagaacaagttggacggctgctgctacgcagtgaagcgcatccccatcaacccggccagccggcagttccgcaggatcaagggcgaagtgacactgctgtcacggctgcaccatgagaacattgtgcgctactacaacgcctggatcgagcggcacgagcggccggcgggaccggggacgccgcccccggactccgggcccctggccaaggatgaccgagctgcacgcgggcagccggcgagcgacacagacggcctggacagcgtagaggccgccgcgccgccacccatcctcagcagctcggtggagtggagcacttcgggcgagcgctcggccagtgcccgtttccccgccaccggcccgggctccagcgatgacgaggacgacgacgaggacgagcacggtggcgtcttctcccagtccttcctgcctgcttcagattctgaaagtgatattatctttgacaatgaagatgagaacagtaaaagtcagaatcaggatgaagattgcaatgaaaagaatggctgccatgaaagtgagccatcagtgacgactgaggctgtgcactacctatacatccagatggagtactgtgagaagagcactttacgagacaccattgaccagggactgtatcgagacaccgtcagactctggaggctttttcgagagattctggatggattagcttatatccatgagaaaggaatgattcaccgggatttgaagcctgtcaacatttttttggattctgatgaccatgtgaaaataggtgattttggtttggcgacagaccatctagccttttctgctgacagcaaacaagacgatcagacaggagacttgattaagtcagacccttcaggtcacttaactgggatggttggcactgctctctatgtaagcccagaggtccaaggaagcaccaaatctgcatacaaccagaaagtggatctcttcagcctgggaattatcttctttgagatgtcctatcaccccatggtcacggcttcagaaaggatctttgttctcaaccaactcagagatcccacttcgcctaagtttccagaagactttgacgatggagagcatgcaaagcagaaatcagtcatctcctggctgttgaaccacgatccagcaaaacggcccacagccacagagctgctcaagagtgagctgctgcccccaccccagatggaggagtcagagctgcatgaagtgctgcaccacacgctgaccaacgtggatgggaaggcctaccgcaccatgatggcccagatcttctcgcagcgcatctcccctgccatcgattacacctatgacagcgacatactgaagggcaacttctcaatccgtacagccaagatgcagcagcatgtgtgtgaaaccatcatccgcatctttaaaagacatggagctgttcagttgtgtactccactactgcttccccgaaacagacaaatatatgagcacaacgaagctgccctattcatggaccacagcgggatgctggtgatgcttccttttgacctgcggatcccttttgcaagatatgtggcaagaaataatatattgaatttaaaacgatactgcatagaacgtgtgttcaggccgcgcaagttagatcgatttcatcccaaagaacttctggagtgtgcatttgatattgtcacttctaccaccaacagctttctgcccactgctgaaattatctacactatctatgaaatcatccaagagtttccagcacttcaggaaagaaattacagtatttatttgaaccataccatgttattgaaagcaatactcttacactgtgggatcccagaagataaactcagtcaagtctacattattctgtatgatgctgtgacagagaagctgacgaggagagaagtggaagctaaattttgtaatctgtctttgtcttctaatagtctgtgtcgactctacaagtttattgaacagaagggagatttgcaagatcttatgccaacaataaattcattaataaaacagaaaacaggtattgcacagttggtgaagtatggcttaaaagacctagaggaggttgttggactgttgaagaaactcggcatcaagttacaggtcttgatcaatttgggcttggtttacaaggtgcagcagcacaatggaatcatcttccagtttgtggctttcatcaaacgaaggcaaagggctgtacctgaaatcctcgcagctggaggcagatatgacctgctgattccccagtttagagggccacaagctctggggccagttcccactgccattggggtcagcatagctatagacaagatatctgctgctgtcctcaacatggaggaatctgttacaataagctcttgtgacctcctggttgtaagtgttggtcagatgtctatgtccagggccatcaacctaacccagaaactctggacagcaggcatcacagcagaaatcatgtacgactggtcacagtcccaagaggaattacaagagtactgcagacatcatgaaatcacctatgtggcccttgtctcggataaagaaggaagccatgtcaaggttaagtctttcgagaaggaaaggcagacagagaagcgtgtgctggagactgaacttgtggaccatgtactgcagaaactgaggactaaagtcactgatgaaaggaatggcagagaagcttccgataatcttgcagtgcaaaatctgaaggggtcattttctaatgcttcaggtttgtttgaaatccatggagcaacagtggttcccattgtgagtgtgctagccccggagaagctgtcagccagcactaggaggcgctatgaaactcaggtacaaactcgacttcagacctcccttgccaacttacatcagaaaagcagtgaaattgaaattctggctgtggatctacccaaagaaacaatattacagtttttatcattagagtgggatgctgatgaacaggcatttaacacaactgtgaagcagctgctgtcacgcctgccaaagcaaagatacctcaaattagtctgtgatgaaatttataacatcaaagtagaaaaaaaggtgtctgtgctatttctgtacagctatagagatgactactacagaatcttattttaaccctaaagaactgtcgttaacctcattcaaacagacagaggcttatactggaataatggaatgttgtacattcatcataatttaa

SEQ ID NO: 118 - DNA, 3017 bp, Homo sapiens
  CDS (397)..(2274)
gccgcggccccctgttgtgttgctgcggagaggtacttggatgcattttacaggttagcctcacttgagctgttgtcctgcaagtaaagtgtatttttggtgattgaaagttggagaactttcatttcagctgagtggtgtagttgaattggttcctgtagccgctgtccctaaacccaggccgacgttaccgccttgtgtcctgactgctagctttcgacgggaccgtctttgagggactcatgtaaagtctctcccttaatgctcagttcttagaagaccgaggcgcagtcatgcaggaaaacctcagatttgcttcatcaggagatgatattaaaatatgggatgcttcatctatgacattggtggataaattcaacccacacacatcaccacatggaatcagctcaatatgttggagcagcacataataactttttagtaacagcatcttccagtggcgacaaaatagttgtctcaagttgcaaatgtaaacctgttccacttttagagcttgctgaagggcaaaagcagacatgtgtcaatttaaattctacatctatgtatttggtaagcggaggcctaaataacactgttaatatttgggatttaaaatcaaaaagagttcatcgatctcttaaggatcataaagatcaagtaacttgtgtaacatacaattggaatgattgctacattgcttctggatctcttagtggtgaaattattttacacagtgtaaccactaatttatctagtactccttttggccatggtagtaaccagtctgttcggcacttgaagtactccttgtttaagaaatcactactgggcagtgtttcggataatggaatagtaactctctgggatgtaaatagtcagagtccataccataactttgacagtgtacacaaagctccagcgtcaggcatctgtttttctcctgtcaatgaattgctctttgtaaccataggcttggataaaagaatcatcctctatgacacttcaagtaagaagctagtgaaaactttagtggctgacactcctctaactgcggtagatttcatgcctgatggagccactttggctattggatcttcccgggggaaaatatatcaatatgatttaagaatgttgaaatcaccagttaagaccatcagtgctcacaagacatctgtgcagtgtatagcatttcagtactccactgttcttactaagtcaagtttaaataaaggctgttcaaataagcccacaacagtgaacaaacgaagtgttaatgtgaatgctgctagtggaggagttcagaattccggaattgtcagagaagcacctgccacgtccattgccacagttctaccacaacctatgacatcagctatggggaaaggaacagttgctgttcaagaaaaagcaggtttgcctcgaagcataaacacagacactttatctaaggaaacagacagtggaaaaaatcaggatttctccagctttgatgatactgggaaaagtagtttaggtgacatgttctcacctatcagagatgatgctgtagttaacaagggaagtgatgagtccataggcaaaggagatggctttgactttctaccgcagttgaactcagtgtttcctccaagaaaaaatccagtaacttcaagtacttcagtattgcattctagtcctcttaatgtttttatgggatctccagggaaagaggaaaatgaaaaccgtgatctaacagctgagtctaagaaaatatatatgggaaaacaggaatctaaagactccttcaaacagttagcaaagttggtcacatctggtgctgaaagtggaaatctaaatacctctccatcatctaaccaaacaagaaattctgagaaatttgaaaagccagagaatgaaattgaagcccagttgatatgtgaacccccaatcaatggatcctcaactccaaatccaaagatagcatcttctgtcactgctggagttgccagttcactctcagaaaaaatagccgacagcattggaaataaccggcaaaatgcaccattgacttccattcaaattcgttttattcagaacatgatacaggaaacgttggatgactttagagaagcatgccatagggacattgtgaatttgcaagtggagatgattaaacagtttcatatgcaactgaatgaaatgcattctttgctggaaagatactcagtgaatgaaggtttagtggctgaaattgaaagactacgagaagaaaacaaaagattacgggcccacttttgaaatttcagtgaataccttaatgttctgtaatttgggaagtttctggcaacacagaactacatagaatcagtattgttttcatggcctccagggaaaaaatgtttttcaagtaagagtaaaagggtgatgggattttataccaacaactgtttcatcttaaaaatatgtatatttttatattaaaaattgtacagtatgtcatctacccaataggaaagtcaacaggatctttattttttgaaagctttagccatccactaagtgccctttttcataagagaagaaaattgtgcataaaaatggttatgttgttttttagtcatcttttttaacatatattttgattgacaaattgcctttcaaatttttggggctagttgagatttaaagagtttgatatgccttctatttttatggagaaagtaattttaaaatggcaatggtgtttctaagccattgactaataaaacatagggttggctagtaattatttgttaacttgatgaagtcaagtatgactattatttattgtacatttgataagacaattttggaattttgaattgacaaattacatgatatcttttgcatttatgttactatatgtacttctgacaaatctttattcctgggtggtatttttaagatatctttacctataaaaatgtttaaggttcataggactcgacaagagctatctggtgatttctcattagtaacatgcaaacgttgtactgcaa

SEQ ID NO: 119 - DNA, 976 bp, Homo sapiens
  CDS (200)..(973)
ccgccgccgccaccttgaaggcggaggacgcaggagccaagagcaagggacgccgccacggtcatcttcgcctgccccgccgccctcttagagacactcattgcctatggatcatcctctcccagcttttgcaagcaccgggctgctcgcccgctgattttcctcctccataggctcactgcggaggcaacggcgaggcatgaagaccccgtttggaaaggcagctgcagggcagcggtccaggacgggcgctggccacggcagtgtgtctgttaccatgataaagaggaaggctgcacacaagaagcataggagccgacccacctcccagcctcgggggaacatcgtgggctgcagaattcagcacggatggaaagatggagatgaacctctaacacagtggaaaggaaccgttctggatcaggtacctgtaaatccctctctgtatcttatcaaatatgatggatttgactgtgtttatggattggaacttcacagagatgaaagagtgtcatcacttgaagtccttcctaatagagttgcatcatctagaatcagtgatacacacttggcagaaataatggttggcaaagcagtggaacatatttttgagacagaggaaggttccaaaaatgaatggagggggatggtcttagctcaggcacctgtcatgaacacatggttttacattacctatgagaaagatcctgtattatatatgtaccagctcttagatgattataaagatggtgacctccgcatccttcaagattccaatgattctcctctggcagagagggagccaggagaagtcatagacagcctggtaggcaaacaggtggaatacgccaaagacgatggctccaagagaactggcatggtcattcatcaggtagaagcaaaaccctctgtgtacttcatcaaatttgatgatgatttccatatctatgtctacgatttggtaaaaacatcttag

SEQ ID NO: 120 - DNA, 2210 bp, Homo sapiens
  CDS (312)..(2024)
ctacaactcccggcagagctcgcggcagggggtgtgccgcaatcggcgaggagcgtgggtgactcaaaccaagtgacggaagtgagcgagggcgtgcctgtttgttgcaggcgcggtgtagcaattggaggacccaggaagaaggggcggacgtattcttgggtcaaccaatggcttgagctcaggagcaaccagggcacggggcgtgtcggggctgattctctggctgtgtggggcgcacggtcccgggatactggggacggcggggtgggagggcgccgtcctggggccgcggcggccgggcgggggagatggcggcgcgatggagcagcgaaaacgtggttgtagagttccgtgactcccaggcaactgcgatgtctgtggactgtcttgggcagcatgcagtgctttctggccgcagattcttatacatcgtcaatctagatgcccctttcgaaggtcaccgaaagatctctcgccagagcaaatgggacattggagctgtgcagtggaatcctcatgacagctttgcacactattttgcggcttcgagtaaccaacgagtagacctttacaagtggaaagacggcagtggggaagttggcacaaccttacaaggccacactcgtgtcatcagcgacttggactgggcggtgtttgagcctgacctcctggttaccagctctgtggacacctacatctacatttgggatatcaaagacacaaggaaacctactgttgcactgtctgctgttgcgggtgcctcccaggtcaaatggaataaaaaaaatgctaactgccttgccaccagccatgacggcgatgtgcggatatgggataagaggaaacccagtacagcagtggaatatctagccgcccacctctccaaaatccatggcctggactggcacccagacagcgagcacattcttgctacctccagtcaagacaattctgtgaagttctgggattaccgccagcctcggaaatacctcaatattcttccttgccaggtgcctgtctggaaggccagatacacacctttcagcaatggattggtgactgtgatggttccccagctgcggagggaaaacagccttctcctgtggaatgtctttgacttgaacaccccagtccacaccttcgtggggcatgatgatgtggtcctggagttccagtggaggaagcagaaggaagggtccaaggactatcaactggtgacgtggtcccgggatcagaccttgagaatgtggcgggtggattcccagatgcagaggctttgtgcaaatgacatattagatggtgttgatgagttcattgagagtatttcccttctgccggaacctgagaagaccctgcacactgaagatacagatcaccagcacactgcaagccatggggaggaagaagccctaaaagaagatccccctagaaatctcctggaagagaggaaatcagatcaactggggctgcctcagaccttgcagcaggaattctccctgatcaatgtgcaaatccggaatgtcaatgtggagatggatgcggcagacaggagctgcacagtgtctgtgcactgcagcaaccatcgtgtcaagatgctggtgaagttccctgcacagtacccaaacaacgccgccccttccttccagtttattaaccccacaaccatcacatccaccatgaaagctaagctgctgaagatcctgaaggacacagccctgcagaaagtgaagcgtggccagagctgcctggagccctgcctgcgccagctcgtctcctgccttgagtcctttgtgaaccaggaagacagcgcttccagcaacccgtttgcactccccaactctgtcactccccccttaccgacgtttgcgcgggtgaccacggcttacgggtcgtaccaggacgccaacattccctttcctaggacttctggggccaggttctgcggagcaggttacctggtatatttcacaaggcccatgacaatgcatcgggcggtgtctcccacagagcctactccgaggtgagtcagggagatgcagaagccgctctacgttcccggggccagaagtggccagagacctgggaaggaccactgagtttgcttttggacagtgcatttcagttcttcagtaaactcccattataagatttatttgagaaagattgaagtcaattaaattgcaaaaaagctgtgaaaaaaaaaaaaa

SEQ ID NO: 121 - DNA, 2694 bp, Homo sapiens
  CDS (1)..(2691)
atggagcccggactacaggggctaggagaccacagtgtggccaacagaaggtggaatgctggtcgagggggctggatccgggcgctgcccgacgtgctgatcatggaactgtccgcagtgctgaattctgagcgtagtctgccgggcgcgctccgcgttgccgggtttgaggctgtcggcgatactggagcccgcgtcttgcctctgattgtgcatttaggggagctatacgctcagttgaatccagaggcgtcatatctagttatcctcctggattccaaagcctcccaggccgagctgggctggactgcactgccaagtaatgggtgggaggagatcagcggcgtggatgaacacgaccgtcccatccgcacgtaccaagtgtgcaatgtgctggagcccaaccaggacaactggctgcagactggctggataagccgtggccgcgggcagcgcatcttcgtggaactgcagttcacactccgtgactgcagcagcatccctggcgccgcgggtacctgcaaggagaccttcaacgtctactacctggaaactgaggccgacctgggccgtgggcgtccccgcctaggcggcagccggccccgcaaaatcgacacgatcgcggcggacgagagcttcacgcagggcgacctgggtgagcgcaagatgaagctgaacacagaggtgcgcgagatcggaccgctcagccggcggggtttccacctggcctttcaggacgtgggcgcatgcgtggcgcttgtctcggtgcgcgtctactacaagcagtgccgcgccaccgtgcggggcctggccacgttcccagccaccgcagccgagagcgccttctccacactggtggaagtggccggaacgtgcgtggcgcactcggaaggggagcctggcagccccccacgcatgcactgcggcgccgacggcgagtggctggtgcctgtgggccgctgcagctgcagcgcgggattccaggagcgtggtgacttctgcgaagcgccctgggaggaggatgagatccgcagggaccgagtggaaccccagagcgtgtccctgtcgtggcgggagcccatccctgccggagcccctggggccaatgacacggagtacgagatccgatactacgagaagggtcagagtgagcagacttactccatggtgaagacaggggcgcccacagtcaccgtcaccaacctgaagccggctacccgctacgtctttcagatccgggccgcttccccggggccatcctgggaggcccagagttttaaccccagcattgaagtacagaccctgggggaggctgcctcagggtccagggaccagagccccgccattgtcgtcaccgtagtgaccatctcggccctcctcgtcctgggctccgtgatgagtgtgctggccatttggaggagctatggcaaaggaggaggggatgcccatgatgaagaggagctgtatttccactggcggtttggggagctgtgctgtggctgcttgcagctccccggtcgccaggagctgctcgtagccgtgcatatgctgagggacagcgcctccgactcacagaggctcggcttcctggccgaggccctcacgctgggccagtttgaccatagccacatcgtgcggctggagggcgttgttacccgagaggaccctgggctgggcaggaggatggcgagattagggagcttggtgctggttctggctctcgaggcccagtctgggaccctgggggggaaacttgtgtgcgtgcggagtggagtggacaacttagcatgtgtgttcccatccctgggcacaggaagcaccttgatgattgtcaccgagtacatgagccatggggccctggacggcttcctcaggcggcacgaggggcagctggtggctgggcaactgatggggttgctgcctgggctggcatcagccatgaagtatctgtcagagatgggctacgttcaccggggcctggcagctcgccatgtgctggtcagcagcgaccttgtctgcaagatctctggcttcgggcggggcccccgggaccgatcagaggctgtctacaccactatgagtggccggagcccagcgctatgggccgctcccgagacacttcagtttggccacttcagctctgccagtgacgtgtggagcttcggcatcatcatgtgggaggtgatggcctttggggagcggccttactgggacatgtctggccaagacgtgatcaaggctgtggaggatggcttccggctgccaccccccaggaactgtcctaaccttctgcaccgactaatgctcgactgctggcagaaggacccaggtgagcggcccaggttctcccagatccacagcatcctgagcaagatggtgcaggacccagagccccccaagtgtgccctgactacctgtcccaggcctcccaccccactagcggaccgtgccttctccaccttcccctcctttggctctgtgggcgcgtggctggaggccctggacctgtgccgctacaaggacagcttcgcggctgctggctatgggagcctggaggccgtggccgagatgactgcccaggacctggtgagcctaggcatctctttggctgaacatcgagaggccctcctcagcgggatcagcgccctgcaggcacgagtgctccagctgcagggccagggggtgcaggtgtga

SEQ ID NO: 122 - DNA, 3434 bp, Homo sapiens
  CDS (78)..(2666)
atcggcgcccgcgcctcgggccgtcgggagcggagcctcctcgggaccaggacttcagggccacaggtgctgccaagatgctccagggcacctgctccgtgctcctgctctggggaatcctgggggccatccaggcccagcagcaggaggtcatctcgccggacactaccgagagaaacaacaactgcccagagaagaccgactgccccatccacgtgtacttcgtgctggacacctcggagagcgtcaccatgcagtcccccacggacatcctgctcttccacatgaagcagttcgtgccgcagttcatcagccagctgcagaacgagttctacctggaccaggtggcgctgagctggcgctacggcggcctgcacttctctgaccaggtggaggtgttcagcccaccgggcagcgaccgggcctccttcatcaagaacctgcagggcatcagctccttccgccgcggcaccttcaccgactgcgcgctggccaacatgacggagcagatccggcaggaccgcagcaagggcaccgtccacttcgccgtggtcatcaccgacggccacgtcaccggcagcccctgcgggggcatcaagctgcaggccgagcgggcccgcgaggagggcatccggctcttcgccgtggcccccaaccagaacctgaaggagcagggcctgcgggacatcgccagcacgccgcacgagctctaccgcaacgactacgccaccatgctgcccgactccaccgagatcgaccaggacaccatcaaccgcatcatcaaggtcatgaaacacgaagcctacggagagtgctacaaggtgagctgcctggaaatccctgggccctctggccccaagggctaccgtggacagaagggtgccaagggcaacatgggtgagccgggagagcctggccagaagggaagacagggagacccgggcatcgaaggccccattggattcccaggacccaagggcgttcctggcttcaaaggagagaagggtgaatttggagccgacggtcgcaagggggcccctggcctggctggcaagaacgggaccgatggacagaagggcaagctggggcgcatcggacctcctggctgcaagggagaccctggaaaccggggccccgacggttacccgggggaagcagggagtccaggggagcgaggagaccaaggcggcaagggggaccctggccgcccaggacgcagagggcccccgggagaaatcggggccaagggaagcaaggggtatcaaggcaacaatggagccccaggaagtcctggtgtgaaaggagccaagggcgggcctgggccccgcggacccaaaggcgagccggggcgcaggggagaccccggcaccaagggcagcccaggcagcgatggccccaagggggagaagggggaccctggccctgaggggccccgcggcctggctggagaggttggcaacaaaggagccaagggagaccgaggcttgcctggacccagaggcccccagggagctcttggggagcccggaaagcagggatctcggggagaccccggtgatgcaggaccccgtggagactcaggacagccaggccccaagggagaccccggcaggcctggattcagctacccaggaccccgaggagcacccggagaaaaaggcgagcccggcccacgcggccccgagggaggccgaggcgactttggcttgaaaggagaacctgggaggaaaggagagaaaggagagcctgcggatcctggtccccctggtgagccaggccctcgggggccaagaggagtcccaggacccgagggtgagcccggcccccctggagaccccggtctcacggagtgtgacgtcatgacctacgtgagggagacctgcgggtgctgcgactgtgagaagcgctgtggcgccctggacgtggtcttcgtcatcgacagctccgagagcattgggtacaccaacttcacactggagaagaacttcgtcatcaacgtggtcaacaggctgggtgccatcgctaaggaccccaagtccgagacagggacgcgtgtgggcgtggtgcagtacagccacgagggcacctttgaggccatccagctggacgacgaacgtatcgactccctgtcgagcttcaaggaggctgtcaagaacctcgagtggattgcgggcggcacctggacaccctcagccctcaagtttgcctacgaccgcctcatcaaggagagccggcgccagaagacacgtgtgtttgcggtggtcatcacggacgggcgccacgaccctcgggacgatgacctcaacttgcgggcgctgtgcgaccgcgacgtcacagtgacggccatcggcatcggggacatgttccacgagaagcacgagagtgaaaacctctactccatcgcctgcgacaagccacagcaggtgcgcaacatgacgctgttctccgacctggtcgctgagaagttcatcgatgacatggaggacgtcctctgcccggaccctcagatcgtgtgcccagaccttccctgccaaacagagctgtccgtggcacagtgcacgccagcggcccgtggacatcgtcttcctgctggacggctcccgagcggctgggtgagcagaacttccacaaggcccggcgcttcgtggagcaggtggcgcggcggctgacgctggcccggagggacgacgaccctctcaacgcacgcgtggcgctgctgcagtttggtggccccggcgagcagcaggtggccttcccgctgagccacaacctcactgccatccacgaggcgctggagaccacacaatacctgaactccttctcgcacgtgggcgcaggcgtggtgcacgccatcaatgccatcgtgcgcagcccgcgtggcggggcccggaggcacgcagagctgtccttcgtgttcctcacggacggcgtcacgggcaacgacagtctgcacgagtcggcgcactccatgcgcaacgagaacgtggtacccaccgtcctggccttgggcagcgacgtggacatggacgtgctcaccacgctcagcctgggtgaccgcgccgccgtgttccacgagaaggactatgacagcctggcgcaacccggcttcttcgaccgcttcatccgctggatctgctagcgccgccgcccgggccccgcagtcgagggtcgtgagcccaccccgtccatggtgctaagcgggcccgggtcccacacggccagcaccgctgctcactcggacgacgccctgggcctgcacctctccagctcctcccacggggtccccgtagccccggcccccgcccagccccaggtctccccaggccctccgcaggctgcccggcctccctccccctgcagccatcccaaggctcctgacctacctggcccctgagctctggagcaagccctgacccaataaaggctttgaaccc

SEQ ID NO: 123 - DNA, 2093 bp, Homo sapiens
  CDS (199)..(1617)
ctcccggtgcagaattccgggctcagcgacagcctgcgccgagtgtgcgcacctgtcggagacccgccagtccgccggccgcggcagggccactacttctcagcacatccggccttctggctcatctcctccctgcatctcactacgcccctccccactccaggcaaaacaagggttcctccagttttggtggtggaaatgtcacagacatcaagcattggtagtgcagaatctttaatttcactggagagaaaaaaagaaaaaaatatcaacagagatataacctccaggaaagatttgccctcaagaacctcaaatgtagagagaaaagcatctcagcaacaatggggtcggggcaactttacagaaggaaaagttcctcacataaggattgagaatggagctgctattgaggaaatctatacctttggaagaatattgggaaaagggagctttggaatagtcattgaagcgacagacaaggaaacagaaacgaagtgggcaattaaaaaagtgaacaaagaaaaggctggaagctctgctgtgaagttacttgaacgagaggtgaacattctgaaaagtgtaaaacatgaacacatcatacatctggaacaagtatttgaaacgccaaagaaaatgtaccttgtgatggagctttgtgaggatggagaactcaaagaaattctggataggaaagggcatttctcagagaatgagacaaggtggatcattcaaagtctcgcatcagctatagcatatcttcacaataatgatattgtacatagagatctgaaactggaaaatataatggttaaaagcagtcttattgatgataacaatgaaataaacttaaacataaaggtgactgattttggcttagcggtgaagaagcaaagtaggagtgaagccatgctgcaggccacatgtgggactcctatctatatggcccctgaagttatcagtgcccacgactatagccagcagtgtgacatttggagcataggcgtcgtaatgtacatgttattacgtggagaaccaccctttttggcaagctcagaagagaagctttttgagttaataagaaaaggagaactacattttgaaaatgcagtctggaattctataagtgactgtgctaaaagtgttttgaaacaacttatgaaagtagatcctgctcacagaatcacagctaaggaactactagataaccagtggttaacaggcaataaactttcttcggtgagaccaaccaatgtattagagatgatgaaggaatggaaaaataacccagaaagtgttgaggaaaacacaacagaagagaagaataagccgtccactgaagaaaagttgaaaagttaccaaccctggggaaatgtccctgatgccaattacacttcagatgaagaggaggaaaaacagtctactgcttatgaaaagcaatttcctgcaaccagtaaggacaactttgatatgtgcagttcaagtttcacatctagcaaactccttccagctgaaatcaagggagaaatggagaaaacccctgtgactccaagccaaggaacagcaaccaagtaccctgctaaatccggcgccctgtccagaaccaaaaagaaactctaaggttccctccagtgttggacagtacaaaaacaaagctgctcttgttagcactttgatgagggggtaggaggggaagaagacagccctatgctgagcttgtagccttttagctccacagagccccgccatgtgtttgcaccagcttaaaattgaagctgcttatctccaaagcagcataagctgcacgtggcattaaaggacagccaccagtaggcttggcagtgggctgcagtggaaatcaactcaagatgtacacgaaggttttttaggggggcagataccttcaatttaaggctgtgggcacacttgctcatttttacttcaaattcttatgtttaggcacagctatttataggggaaaacaagaggccaaatatagtaatggaggtgccaaataattatgtgcactttgcactagaagactttgttagaaaattactaataaacttgccatacgtattacaaaaaaaaaa

SEQ ID NO: 124 - DNA, 3366 bp, Homo sapiens
  CDS (401)..(3202)
agtttttgctcccgagcgagtcagggacgggagcaggcacgcacagtcgcgttctgccacttgctgggaaaacagcaacagaaggatattaaggagccacccctataatttacccagatagccccagcaaggtcaaagacatatcatgtcccaaggagaaaagctgcaggcatctgaggataaatcactgtgaaacagctttgaccataaagctgacttggaagactttgactccaaggtgcaaggtggtttggacaccctcaatattgcctgctcttttctagtcaaacctgattcatgaaatggaatgaagctgaaaaatcatctacttctttgtttgtggatttgagagaagattgggatggtcttaagtgcataaaacgagactctaactgcagcgatgagttcagatgagaagggcatttcccctgcccataaaacatccactccaacccatagaagtgcctcctcttcaacatcctcccaaagggacagtaggcagagtattcacatactggagaggactgcttcctctagcaccgagccctctgtaagtcggcaattgctagaaccggagccagtccccctctccaaggaagctgacagctgggaaattatagaagggctgaaaataggccaaaccaatgtccagaaaccagacaaacatgagggctttatgctgaagaaaagaaaatggcctttaaaaggctggcacaagcgtttttttgtcctggataatggaatgttaaagtattcaaaggcaccactcgatattcagaaaggaaaggtccatgggagcatagatgtgggactctcagtcatgtcaattaaaaagaaagctcgaagaatagaccttgacaccgaagagcacatctatcatttgaaggtgaaatcccaggactggtttgatgcatgggtctccaaactgcgacatcatcggttgtatcgtcagaatgaaattgtgagatcaccaagagatgctagttttcacatatttccttcaacgtccacagctgaatcctcaccagctgctaatgtttctgtaatggatggaaagatgcaaccaaacagctttccgtggcagtcccctttaccatgcagcaatagcctccctgcaacgtgcacaactggccagagtaaagtggcagcctggttacaggactcggaagagatggacaggtgtgcagaagatcttgcacattgccagtcaaaccttgtggaacttagcaaactcctgcaaaatttggaaatacttcagagaactcagtcagcacctaactttactgacatgcaggctaactgtgtagatatttcaaagaaagacaagcgggtcacaagacgatggagaacaaaaagtgtcagcaaagatacaaaaatacaactgcaggttcctttcagtgctaccatgtcaccagttcgcttgcattcctccaaccccaacctttgtgcagatattgaatttcagactccccctagccacctcactgaccctctggaaagttcaacagattatacaaagctgcaagaagaattttgtctaatcgcacagaaagtgcattctcttttgaagtctgcatttaatagcatagctatagagaaggagaagctgaagcagatggtttccgagcaggatcacagtaaaggccacagcacgcagatggcacggctccgacagtcactgtctcaggcactcaaccagaatgctgaactaaggagtcggttgaacagaatacattcagagtctattatttgtgatcaggttgtcagtgtaaatattattcctagccctgatgaggctggtgagcaaatccatgtcagtctccccttatcacagcaagtagccaatgagagccgcctctccatgtcggagtctgtttctgagttctttgatgcccaagaggtgctcctctctgcaagttcgtcagagaatgaggcttcagatgatgagtcttacatcagtgatgtgagtgataatatatctgaagacaacaccagtgttgcagacaatatttctcggcaaatcctgaatggggagcttacaggaggggccttccgaaatgggcgtcgagcatgcctgccagctccttgtcctgacaccagtaacattaacctgtggaatatcttgaggaacaacattggtaaagacctgtctaaagtctctatgcctgtggagctaaacgggccgctcaacaccctgcagcacctctgtgaggaaatggaatacagcgagctcctggacaaggcttcggaaactgatgatccatatgagcgcatggttctcgttgccgcatttgcagtttcaggatactgctccacctatttcagagcaggaagtaagccattcaacccagtccttggggagacttatgaatgcattagagaagacaagggattccgctttttctcagaacaggttagccatcatccacccatttctgcctgtcactgtgaatcaaagaattttgtgttttggcaagatatcagatggaaaaacaagttctgggggaagtcgatggaaatcctgcctgttggaacactgaatgtcatgcttccaaagtatggagattactatgtgtggaataaagtcaccacttgcatacacaacatcctcagtgggagaagatggatagaacattatggagaagtaaccatcagaaataccaaaagcagtgtttgcatttgcaaactcacatttgtcaaggtgaattattggaattctaacatgaatgaagtccagggggtggtgatagatcaggaggggaaggcggtgtaccggctgtttggaaagtggcatgaaggactctactgtggtgtggccccctctgcaaagtgcatttggagaccaggttccatgccaacaaactatgagctgtactatggcttcacaaggtttgctattgagctcaatgagttagatccagtactaaaagatctccttccaccaacagacgcccggttccggccagatcaaagatttttggaagaaggaaatttagaagctgcagcatcagagaagcaaagagtagaggaactccagagatctcggagacgatatatggaagaaaacaatcttgaacatataccaaaattttttaaaaaagttattgatgccaatcaaagagaagcctgggtttctaacgacacctactgggagcttcgaaaggaccctgggtttagcaaagtagacagccctgttctttggtagactgggaatgtagagctagccaacatatcacattctgaatgaataaataactatgcacaattatgtttcttatagctatgtgtggtttctgggtcaactgaaaacctaccatttgcttttctattcatctttataatggactttcagaagtgcattagaca

SEQ ID NO: 125 - DNA, 4254 bp, Homo sapiens
  CDS (345)..(3047)
  misc_feature (1)...(4254): n = a,t,c or g
gttgttaaagaaaaaaaagtaggtgaaggaagggacaggaagaggtggggcattctgtgtagagagaacaacataaataaggcactgtagcagcggctgacagcattttgaatgactaaaataggagttcaggactggaacagagagaagcagggcagaatggtggaagacaaaactggtgaaggaagcagaagccagatcatgcgggtccttgtagaccatgttaagaacctgtactccattaccagaacagctgtggaaagcttttaagcttgggattaacgtgatgagatattcaatttaaaggatcattctggattggggaaggtgaagggcatgagaggatgtggggaaatcagatgatggtaagttgggctaaagtggtgatcatgaagatggaaagaaaggatgaaattgagagctatttaggggactctgtggcaacagcatccgggccactactagtcgaagttgccaaaactcctggtgccagccttggggttgccctaactacctcgatgtgctgtaacaaacaagtcattgtcatagacaaaatcaaatctgcaagtattgcagacagatgtggcgcattgcatgtgggagatcacatcctctccatcgatggaaccagcatggagtactgtacacttgcagaagcaacccagttcctggccaacaccactgaccaggtcaagcttgagatccttccccatcatcagacccggctggccctaaaggggcccgaccatgtgaaaattcagaggagcgacaggcaacttacctgggattcctgggccagcaaccacagcagccttcacaccaaccatcactataacacgtaccaccctgaccattgcagagtaccagccctgacattcccgaaagcacctcctccaaacagccctccagctttggtgtcttcatccttctctcctacctccatgagtgcatacagcctgagttccctgaacatggggactctacctcgaagcctctactccaccagcccacgtggaaccatgatgaggaggagactgaaaaagaaagacttcaaaagctcattgtccttagcctccagcacagtaggattggctgggcaggttgttcacacagaaaccacagaggttgttctgacggcagatcctgtcacaggatttgggatccaactgcagggcagtgtgtttgccacagaaactctctcttctccacctctgatttcctatatcgaagctgacagcccagcagagagatgtggggtgctacagattggagacagagtgatggccatcaatggaattccaacagaagacagcaccttcgaagaagccagtcagctcctccgagactcttcaatcacgagcaaggtcacactggaaatcgagtttgatgttgcagagtctgtcatcccaagtagtggaacatttcatgtaaagctgcctaagaagcacaatgtggaacttggaataaccataagttcaccatccagtagaaaaccaggagaccccctcgtcatttcagatatcaagaaagggagtgtggcacacagaactgggaccctggaacttggggataaattgctcgcaatagataatatccggctggacaactgttccatggaagatgcagttcagatcctccagcaatgtgaagacctggtgaagctcaaaatccgcaaagatgaagataattcagatgagcaagaaagttccggagcaattatttacaccgtggagcttaaacgctacggggggccccttggcatcacaatttcaggaactgaagagccgtttgatcctataatcatttcaagcctcactaaagggggattagctgaaagaactggcgcaatccacataggagaccgaatcctagccatcaatagcagcagcttgaaagggaagcctctgagtgaagccatccatttgttacagatggcaggagagactgtcaccttgaaaattaagaaacagacagatgcccagtcagcatcgagccccaagaagttccctatttctagccatttgagtgacctgggggatgtggaggaggactcctcaccagcacagaagccaggcaagctctccgacatgtacccctccacggtgcccagtgtggacagtgctgtggattcatgggatgggtctgcaatagacaccagctatggaactgaaggcactagttttcaggcctcaggatacaatttcaacacctatgactggaggagtccaaaacagagaggcagcttgtccccagtcactaagcctcgaagccagacttacccagatgtggggctgagttatgaagactgggaccggtccacagccagtggttttgcaggggctgccgatagtgcagagacagaacaagaggagaacttctggtctcaagcgctggaggatttggaaacctgcggacagtcaggaattctgagagaactggaggcaacaatcatgtcggggagcacgatgagtttgaatcatgaggctccaacacctcgcagtcagctggggcgacaggccagcttccaggagcgcagcagctcgcggccgcactacagccaaacaactcggagcaacaccctgccttcagatgtgggtaggaagtcagtaaccctgagaaaaatgaaacaagaaataaaggagatcatgtctccaactcctgtggagctgcacaaggtgaccttgtacaaggactctgacatggaggactttgggttcagtgtagcagatggcttactggagaaaggagtgtatgtcaaaaatattcgcccagctgggccaggagatcttggtggcttaaagccctatgacaggctcttacaggtgaatcatgtccgaaccagagactttgactgctgccttgttgtgcccctcatagcagaatccgggaataagctggacctggttattagtagaaacccactggcttcacagaagtctatagaccaacagagtctaccaggagattggagtgaacagaacagtgcttttttccagcagcctagccacggtggtaatttggagacacgagaacccactaatacattatagcaacgctttttataaagcaggacaaaagacaatatctacatggtgctaaaaatcctttaagatttctgtgacctttgaagcacagataatcaatcaacgtggcattaactgcaagcacaggggtcttttaaatctctctcatggctcatgttcacttcccttttcaagttgaagaggtttcttttttggtgaccactatggtatatggtgggcaatgccctgccagtcccaacggtagagaaaaataggccgtcccccacaactctacaattaacatcagaggaaattttttacaagttcatcttactatcactttttaaaaagagaaacatctgtttgaaaatattctctgtgatgatttccttaattcactttgaaatcagtttcttactatgaagtcattaatgtaagaacttggccaacaaagcttttcttctcataggctggctctactaggggaactagtgtttggtaaactgctgggactaccacaatgggaggggtacaggtataaaattaagttatcttaaaatgtttcagcaatgatgcacgtaggagaccataataggtggtggtaaatgttttgcccacgtataggaatgattttaactaagacgtatgctattccctatgcaacaaattatcaaacaggatatgtcttgtgacctgttttttttttaaggacacatttttaatagctgaaaatctctgataatgaattagagtgtgtagtaaacatgagaattagttatattatcttatttttaaaattcaagactaagaacttcagagaatgaagagtctattaaaatgaggttcatcttaatgataggcaaaccaaactcatactgcttgacatgttttgaaaactggtaatattgagggtgtacagcacatgtacttaaaatgacactggttatcttggttctgggcatggccatttacgtaattgttaataccttcttcacaaatgcttggcaattatttacattccttaaggcataatggaagtgcttaagtggggcccggttcttggtcgaattggatagtcgcattagttttcggggctcaacaatctgttggttgtggggggcccttgaggattttcacgtttggggctcaaacacaggggaaggggtttggaaaaaacattgggaaaaaacacgggaaggagagagaaattttatagnngggtttgaggatc

SEQ ID NO: 126 - DNA, 7003 bp, Homo sapiens
  CDS (262)..(5352)
  misc_feature (1)...(7003): n = a,t,c or g
gagtgtcttcaagagtgaacaaaatcccaggtccgtcaggaagccaagtatgtggaaagcccagagtgcctggagatgcagttataatgccattcagagaagtagccaagccaacagagcctgatgagcatgaagcanaggccgataatgaaccgagctgttcgccggcagctcaagaactgttgacaaggctggggatttttactgggagaagggatcccaagtgccacacacataaccattgaagacaaaaatgaaaccatgtgcacagctctgagtcaaggcatcagtccttgctccacactaacaagcagcaccgcatctcctagcaccgatagcccctgctcaaccttgaatagctgtgtcagcaagacggcagccaacaaaagtccctgtgagaccattagcagccctagttccaccctggaaagcaaggacagtggaattatagccacaattacaagttcatccgaaaatgatgaccggagtggctccagtttggaatggaataaagatggaagcctaagattaggggttcagaagggagtgcttcatgaccgcagggcagataactgctccccagtggcagaagaggagaccaccgggtcagcagagagcacgctgcccaaagcagaatcctcagctggagatggtccagtcccttattctcagggctccagctcactaataatgccacggcccaactcagttgcagcaacaagctcaaccaaattggaagatctgagttatttagacgggcagagaaatgctcctctacggacgtcaattagattaccatggcacaatacggccggaggtagggcacaggaagttaaagcacgatttgctccctacaagccacaagacattttgttgaaacccttgttgtttgaagtaccaagcataacaacagactctgtgtttgtgggaagggattggctctttcaccagatagaagaaaacttgaggaacacagaactggcagaaaacagaggcgcggtggtggttggcaatgtgggatttgggaagacggcaatcatttccaagttggtggccctgagctgccacggaagccgcatgaggcagattgcttccaacagcccgggttcatcacctaaaacctctgaccccactcaggatcttcatttcactccgttgctttcaccgagttcttccacaagtgcttccagcacagctaaaacacctcttgggtctatcagtgctgaaaaccagagaccaagagaggatgcagtgaaatatcttgcttctaaggtggtggcctaccactactgccaggctgacaacacgtacacttgcctggtgcccgagtttgtgcacagcatcgcagctttgctctgccggtcccatcagctggccgcctacagagaccttctgataaaggagccccaactacagagcatgctgagcctccgatcctgtgtgcaggacccggtggcagctttcaagaggggagtgctggagccactcacaaacctgagaaatgagcagaaaattcctgaagaagaatacattattttgatagatggcttaaatgaagctgagtttcataaacctgattatggagatacgctttcttcatttattaccaaaattatttctaaatttcctgcctggttgaagttgattgtgactgtaagagcaaattttcaggaaatcataagtgcgctgccatttgtcaagctttccttagatgacttcccagacaacaaagacatccacagtgacctgcacgcctacgtccagcacagggtgcacagcagccaggacatcctcagcaacatctccctgaacggcaaggccgatgccacactcattggaaaagtgagcagccacctggtgctgcggagcctcggctcctacctgtacctcaagctcaccctggaccttttccagaggggccacttggtcattaagagtgccagctacaaggtggtgcccgtgtctctctctgagctctatttgcttcagtgcaacatgaagttcatgacccagtccgcctttgagagggcacttccgattctcaacgtggccctcgcatccctccaccccatgacagacgagcagatctttcaggctattaatgctggccacatccagggggagcagggatgggaagactttcagcagaggatggacgccctctcctgcttcctcattaagaggcgagacaaaacccgcatgttctgccacccgtccttcagggagtggcttgtatggagagcagacggggaaaacacggccttcctgtgtgagcccaggaacgggcacgcgctcttggcattcatgttctcgcgtcaggagggcaagttgaaccgccagcagaccatggagcttggccaccacatcctgaaggcgcacattttcaagggcctcagtaagaagacgggaatttcttcaagccatctccaagccctgtggatcggctacagcaccgaggggctgtccgccgccctggcctctctcaggaatctctatactcccaacgtgaaggtgagccgtctcctgattttgggaggggccaacgtgaactacaggacagaagtgttaaataatgccccaatcctgtgcgtccagtctcaccttggccacgaggaagttgtcactctgctcctggaatttggtgcctgcctggacggaacgtcagagaacggcatgactgccctctgttacgcagcagctgctggccacatgaagctggtgtgtctgctgaccaagaagggagtgagagtggaccacttggataagaagggccagtgtgcgcttgtccacagtgccctacggggccacggtgacattctccagtacctgctgacttgtgagtggtcgccgggtcctccccagccaggcaccctgaggaagagccacgccctgcagcaggcgctgaccgcggcggccagcatgggccacagctcggtggtccagtgcttgctggggatggagaaggaacatgaagtagaagtcaatggcaccgacacattgtggggagaaacagccctgactgccgccgcaggaagagggaagctggaggtctgtgagctgctgctggggcatggagctgctgtgtcgcggacaaacaggagaggggttccacctttgttttgtgcagcacgccaggggcattggcagattgttagactgctgttggaacgcggctgtgatgtgaacctaagtgacaagcaaggccggacgcccctcatggtggctgcttgtgaagggcacttgagcaccgtggaattcctcctttcaaaaggtgcagccctttcttctctagacaaagagggtctgtcagcattaagctgggcttgtctgaaaggtcacagggcagtggtccagtatctggttgaagaaggagctgcaatagaccagacagacaagaatggccgcacacccttggacctggctgccttctatggcgatgccgagactgtgctgtacctggtggagaagggagccgtgatcgagcatgtggaccacagcgggatgcggcccttggacagagccatcggctgccggaacacatctgtagtggtggcgctactcagaaagggagccaagttaggaaatgctgcttgggcgatggccacttccaaacctgatatcttgattatacttttacagaaattaatggaggaaggaaatgtgatgtacaaaaaagggaaaatgaaagaggcagcccagaggtaccagtatgccttaagaaagtttcctcgagaaggattcggagaggacatgagacccttcaatgaattaagggtttccctctatctcaatttgtcgcgatgccgaagaaaaaccaatgactttggcatggcagaggaatttgcttccaaggctctcgaattgaagcccaagtcctatgaagccttttatgccagagcaagagcgaagagaaatagcaggcaattcgtggcagctctggctgacctgcaagaggctgtgaaactctgtcccaccaatcaggaagtcaagaggcttctggcccgcgtagaagaggagtgcaaacaactccagaggagtcaacagcaaaaacagcagggcccgctaccagctccactcaacgactccgagaacgaagaggacaccccaacccctggcttaagtgaccactttcactctgaggagactgaagaggaagaaacttctccccaggaagaatctgtttccccaactcccaggtcccagccatcctcatctgtcccttcctcatacatccgaaaccttcaagaagggttacagtccaaaggaaggccggtatcgccacagagcagggcaggaatcggcaagtccctgagagagcctgtggcccagccagggctgctcctgcagccctccaagcaggcccagatcgtgaaaaccagccagcacctgggctctggccagtcggcagtgagaaatggcagtatgaaagttcagatctcttctcagaaccctcctccaagtcccatgccagggagaatcgctgctgctcctgctgggagcagaacccagcatttagagggaacgggtactttcactacaagagctggttgtggccactttggggatcggctgggccccagccagaatgtccgcctgcagtgtggtgagaatggccctgcacaccctttaccaagtaagacgaaaaccacagagaggcttctgtctcattcctccgtggctgtggacgcagcccctccaaaccaaggtgggctggcgacctgcagcgacgtgcgacacccagcttccctcaccagctcaggctcttctggttctccatccagcagcataaagatgtcaagttcaaccagtagtttgacttcgagcagcagtttttcagatggcttcaaggtccaaggaccagatactagaattaaagacaaggttgtaacccacgttcagagcggtacagctgagcacagaccccgcaacacgccgttcatgggcatcatggataagactgcgaggttccaacagcagagcaatcctccaagccgcagctggcactgtccggcaccagaggggctgctgacaaacacgtcttctgcagctggcctgcagtctgctaacactgagaagccctctctcatgcaagtgggaggatataataaccaagccaaaacctgttctgtttctaccctgagtgcaagtgtccacaatggggcacaagtgaaggagctagaagaaagcaagtgccaaattccagtccactctcaagagaacaggataactaagactgtttctcatctgtaccaggaaagtatctccaaacagcagcctcatattagtaatgaagcccacaggagccacctcactgcagccaaaccaaagcgatcatttatagagtcaaatgtgtgaaccttaagaaagccccatttgtggaatttggaaacgtgtgttgactcctggtggtaaattaaatagtttttttcatcagaaaaattattttttagccattttttttctttggggtggatctgatgccattgatatatctaaaatgtgggataaaacttctttaatagctagaaatcaccataaataagaatgctaaacagaattgaaaattatatcaacttaaaattttaagacagcccagaagacattaatgactctcacttatgaaattgtttggcttttgccactttcctccttgcctttgctatatggtagaatcacagaacttacttagagaataaatatgtctattgttcaagagtaacaggtttaactcatgaccaagtgatgtacatccaagtgatgtattctggaaacgatggaattttacagttacagttccattgagtcaaatcccattttatatatacataaaaattaagttctgagtgagttctagctaaatataagtgcgactgtaaacgcagccaatttttttaagcagaatatgagaacacctaagtattctcttcatagcagttcctataaagggattaaacacttatttctgtgttatggttcttattcatatatttttatagcacctttttttggaacctatatttgtgcttgaaggtgtttttgatatttggaaacagtataagccatttggagtcatgattggtggtcaagtggattcaagctaaaatactaagaccagcattcttagtggcgcttataaattagctctcacctggtttccaaactgcttttaacaatggtagtgctcctggaacaatccttccaagctcctctaaggacaatatttaattcagatactaaaggtaagactggttgttacttttgttttgttgtacaattagtactttatagtcacatgttgtatatattaaatagcccagttttattcagacttgtaaatagaactatttcaatgtagttaatctaaaaacaaaaaagaaaccccagtcacgatttgcatgttctctgtaagcttcatccatgctggttattgcactgaatgatatattattagggcatgttaacagtataccagtaacagcactttatctcatttatatgaacacctttgaggtgctacttaagtccaagctctgatgtattattcatttgtaaagataaggtacaggaatgaaccttggtttaaaggtatttttatatgaaaatggtgtgttattggaagatgttaaagtgctaatttgagagaagtaggagtgtatctgttttatatgttgggatgtgaaatttattttctaaaattgaggagaaggaagttatatatttgcagaatgttttaaagtgaattgttgtaatgaagttcctgtgaacatcattatggttttgtacaaataggaacctctgatgtcattcttcaacgtttgttcctgtgtgtacaattgtactttgtatgaacagctttatcatttttataggctttccatgagttttgctgtaactactatggcttatttattttctttaatatttgtgaaagtcttactcctttgttagttttgtttctgcacaactactgtacttttccatatggaataaagactattaatag

SEQ ID NO: 127 - DNA, 919 bp, Homo sapiens
  CDS (198)..(809)
gggaggaggaggaggagttggaaggggaggaggaatagggggagcagtattaggggcagaaggaagaagaagagggggaggagaaagagatagaagagtaagaggagggggaagaaagacaaggggaaggggaggaggaggaggacggggaggagcttcgccgcggcctgctccgcccagccggggtcggtggccgcatggcttcggtctcctctgcgaccttctcgggccacggggctcggtccctactgcagttcctgcggctggtagggcagctcaagagagtcccacgaactggctgggtatacagaaatgtccagaggccggagagcgtttcagatcacatgtaccggatggcagttatggctatggtgatcaaagatgaccgtcttaacaaagaccgatgtgtacgcctagccctggttcatgatatggcagaatgcatcgttggggacatagcaccagcagataacatccccaaagaagaaaaacataggcgagaagaggaagctatgaagcagataacccagctcctaccagaggacctcagaaaggagctctatgaactttgggaagagtacgagacccaatctagtgcagaagccaaatttgtgaagcagctagaccaatgtgaaatgattcttcaagcatctgaatatgaagaccttgaacacaaacctgggagactgcaagacttctatgattccacagcaggaaaattcaatcaccctgagatagtccagcttgtttctgaacttgaggcagaaagaagcactaacatagctgcagctgccagtgagccacactcctgagacactctctaaattgctgcactcctgtaacaaacattatttttccatttcattgtattgtgttttgccattgttggtctgttgatttccctagatgtgagtctgtt

SEQ ID NO: 128 - DNA, 5397 bp, Homo sapiens
  CDS (97)..(5085)
tcccggacagcagcgggttaagtgccgcccgcgcggagacggctgagtccggagccgcggctccgagctcgcattcggatccgctagagcaggaagatggcgacggacggcgcgagctgcgagcccgacttgtcccgggccccggaggacgcggcgggggccgcggcggaggcggcgaaaaaagagtttgatgtggatactctcagtaaatccgagctgcggatgctcctcagcgtgatggaaggggagctggaggccagagaccttgtcatcgaggccctgcgggctcgcaggaaggaggtatttatccaggaacggtatgggagatttaatctaaatgacccgttcctggcactccagagagactatgaagcaggtgctggtgacaaagagaagaagccagtttgtaccaaccccctctccatccttgaagcagtcatggcccactgcaagaaaatgcaagaaaggatgtccgcacagctggctgctgctgagagcagacaaaagaagctggaaatggagaagcttcagctacaagcccttgagcaagagcacaagaagctggctgcccgccttgaggaagagcgtggcaagaacaagcaggtggtcctgatgctggtcaaagagtgcaagcagctctcaggcaaagtcatagaggaggcccagaagctcgaagacgtaatggccaaactggaagaggaaaagaaaaagacgaatgaattagaagaggaactctccgctgagaaacgaagaagcacagaaatggaagctcagatggaaaaacaactctctgagtttgacactgagcgggaacagcttcgtgccaagctgaaccgggaagaagcacacaccactgacctcaaagaggagatagacaagatgaggaaaatgattgagcaactgaaaaggggaagtgacagcaaaccaagcctctctcttccacggaagacaaaagataggcgtttggtttccatatctgtgggaacagaaggaactgtgacaaggtctgttgcatgccagacagacctagtgacagaaaatgctgaccacatgaaaaagttgcctttaaccatgcctgtaaaaccttccacagggagtcccctagtttctgcaaatgcaaaagggagcgtgtgcaccagtgccaccatggccagaccaggtattgacaggcaggcttcctatggtgacttgattggcgcttctgtacccgctttcccacctccaagtgcaaacaaaattgaggaaaatggaccaagcactggctcaacaccagatccaaccagtagcacacccccacttcccagtaacgctgcccctcccaccgctcaaacaccaggcatagctcctcagaactcgcaagctccacctatgcacagtttacattcaccatgtgccaacacctctttgcatccaggtctaaacccacgaatccaagcagctagatttagatttcagggcaatgctaacgacccagaccaaaatggaaatactacccaaagtcctccgtcaagagatgtctcgcctacaagtcgtgacaacctagtggccaaacaactagctcggaatactgtgacccaagcactgtcaagatttacaagccctcaagcaggtgctccctcaaggcctggagtgcccccaacaggggatgttggcacccaccctccagttggtcggaccagtttaaagactcatggtgtagcacgagttgacagaggaaatcctcctcctatccctccaaaaaagccagggctctcccaaactccttctccaccacacccccaactcaaggttattatagacagcagcagggcctcgaacacaggggccaaagttgataacaaaactgtggcttcgactccttccagtttgccacaagggaacagggtgatcaatgaggagaaccttcctaagtcatcctcccctcagctgccaccaaaaccatccatagatttaactgtggcacctgcaggctgtgccgtttcagccctggccacgtctcaggtgggtgcctggcctgctgcaacccccggactgaaccaacctgcatgttcagacagttcccttgtcattcctaccaccattgccttttgctcttccataaaccccgttagtgcctcatcctgtagaccaggtgcctcagacagcctcctggtaacagcatcaggctggtcaccctccctaacccctttgctaatgagtggtggtcctgcccccctggctggcaggcccacccttcttcagcaagctgctgcccagggaaatgtcactttattatcaatgctgcttaatgaagaaggactggacattaattactcctgtgaagatggccattctgccttgtattctgctgctaagaatggacatacagactgtgtgagattgctgctgagtgcagaagcccaagtcaatgctgctgataaaaatggcttcacacccttgtgtgctgcagctgctcagggacatttcgagtgtgtagaattattaatttcatatgatgctaacattaatcatgctgctgatggaggacagacacctctatacctggcctgtaaaaatggaaataaagaatgtattaaactcttgttggaagctggaaccaatcgaagtgtaaaaaccacagatggctggacaccagttcacgcagctgtggacactggtaatgtggacagcctcaagcttcttatgtaccatagaataccagctcatggaaattctttcaatgaggaggagtccgagtcaagtgtctttgacttggatggaggagaagagagtcctgaaggcatatccaagcctgttgttcctgcagacctcattaaccacgccaacagagaaggctggactgctgcccacattgctgcttccaaaggttttaagaactgcctagaaatcttgtgtaggcacggagggcttgagccagaaaggagagacaagtgcaatcggactgtgcatgatgttgccactgatgactgcaagcatttgctggagaatctgaatgctcttaaaatacccttaaggatttcagtgggtgagattgaaccaagcaactatggttctgatgacttggaatgtgaaaacacaatatgtgctttaaatatccgcaaacagacatcatgggatgatttttcaaaagcagtgagtcaagctctgacaaatcatttccaggcaatctcttctgatggatggtggagtctggaagacgtgacttgcaataacaccactgattccaacatcggcctcagtgcaagaagcatacgatccatcacgctaggaaatgtgccgtggtcagtgggtcagagcttcgcgcagtccccgtgggactttatgaggaagaataaggcagagcacatcactgtgcttttgtcaggtcctcaagaaggctgtctcagtagtgtgacttatgcctccatgatccctctccagatgatgcagaactacctcaggctggttgagcaatatcataatgtcattttccacggcccagaaggaagcttgcaagactacatagtacatcagcttgcactctgcctgaagcacagacaaatggctgcaggattctcctgtgaaatagtgagagctgaagtagatgctggtttttccaaggaacagctactagacctgttcattagtagcgcttgtctgatcccagtgaaacaatctcccagtaagaagaaaatcatcatcattttagaaaatttagaaaaatcttcactgtcggagttattgagggactttttggcacctcttgaaaatcgcagcactgaaagcccctgcactttccaaaaaggaaatggactgtccgaatgttattactttcatgagaactgctttctgatgggaaccatcgccaaggcctgtctccagggctccgacttgctggtgcagcagcatttccgctgggtgcagctgcggtgggatggcgagcccatgcaaggactgctgcagaggttcttacgaaggaaagttgtgaataagttcaaaggtcaggcgccctccccctgcgatcctgtgtgcaagattgtcgactgggctctgtccgtctggcgtcagcttaactcctgcctggcccgcttgggcacacctgaagcacttcttggaccaaaatatttcctgtcttgtcctgtagttcctgggcatgcccaagtgacagtgaagtggatgtctaagctgtggaatggcgtcatcgcacccagagttcaagaagcaatattgtcaagagcctctgtgaaaagacaacctggctttgggcagacaactgctaaaagacaccctagccaaggacagcaggctgtggtcaaagctgctctcagcatcttgctaaataaagctgtactgcatggctgtcccctccccagagcagagctagaccagcatacagctgatttcaaaggaggaagtttccctttatccatagtttccagttataacacttgtaacaagaagaaaggagagagtggtgcctggagaaaggtgaacaccagtcctcgcaggaagtctggccgcttctctttacccacctggaataagccagacctaagcactgaaggtatgaaaaataagactatatcacagctgaattgtaacaggaatgcttctctgtcaaaacaaaagtctttagagaatgatctatcactgacgttgaatttggatcagagactctctctgggttcagatgacgaagcagatcttgtcaaggaacttcagagcatgtgctccagcaagtctgagtctgatatcagcaagattgctgattccagggatgatttaaggatgtttgatagttctggaaacaaccctgtactttcagcaactattaataatctgagaatgccagtgtcacaaaaggaggtcagtcctctcagcagccatcaaactactgaatgcagcaacagtaaatcaaagactgagttgggtgtttcaagagttaaatcttttcttcctgttcctagaagtaaagtcacccagtgttcccagaacaccaaaagaagcagcagcagcagtaatacaaggcaaatagaaatcaacaacaactcaaaagaagtgaattggaacttacacaaaaatgaacacctagaaaaacctaacaaataggcctgcctacaatattctcattattaacttcctctatttcacacagaaaccaaggacaacaagatacaaatacctttaaattgataaaatgttttcactgtaatataaattatgagtgcgggaccactattcaatttttttttgtaaagaatgtatttataaccaacattttgttgcttttttttttaattctgtaggattgaacttcaataccaggaagttatgccaacttttcaagtagttttataatagaaaaattgtaatagttttaatcaagatgttcaggggtattaaaacagaactgtgtac

SEQ ID NO: 129 - DNA, 3211 bp, Homo sapiens
  CDS (232)..(2757)
tctgacatctccttccttcctggttcctgcagcagctgctgccactgctcagcgcggtgaggagggagccggtgactcggagacggtgactcagaggcagagcggcgcaagggccaaggagtactggcgtccatggaccctggggaccccgtcaggagcaggtgacatccttccccttccaccctgctccctgctctacatccccagcagggagtggcctctcccttctccatggacttccaagagagggacccgcccttcctgcctgagagcgctcagtcctcaaagcccagcagtgctcagcaggcctctgagctgtgggaggtggtggaggagcctcgggtcaggctggggacagagggtgtcatgcctgagaggcaggaaggtcacctgctcaagaagaggaagtggcctctgaagggctggcacaagagatactttgtgctcgaggacgggatccttcattatgcaacaacccggcaagacatcaccaaggggaagctccatggctccatcgatgtccggctgtcggtcatgtccatcaacaaaaaggcccagcgcattgaccttgacactgaagacaacatctaccacctcaagatcaaatcccaggacctattccagagctgggtggcgcagctgcgtgcccaccgcctagcccaccgcctggacatgccccgtggctcactgcccagtactgctcaccggaaggttcctggtgcccagcttccaacagcagctactgcctcagccctacctgggcttggaccgcgggagaaagtgtcttcctggctgagggacagtgatgggctggaccgctgctctcatgagctctctgagtgtcaggggaagctccaggaactacacaggctcctccagagcctggagtccctgcaccgaatcccctcagcccctgttatccccacacaccaggcctcagtgacaaccgaaagacccaagaaggggaaacggacaagccgcatgtggtgcacccagagctttgccaaggatgacaccattggacgggttggtcgtctccatggctctgttcccaacctgtctcgctacctggagtctcgggactcctcgggcacccgtgggctgccacccacagactatgcccacctgcagcgcagcttctgggccctggcccagaaggtgcacagctccctcagcagcgtcctggccgccctcaccatggaacgggaccaactgagggacatgcaccagggctcagagttgtcaagaatgggggtctctgaggcctccactggccagaggcgcctccactcactgtccacctcctccgacaccacggcggactctttcagctccctcaaccctgaggagcaagaagctctgtacatgaaggggcgcgagctcaccccccagctatcgcagaccagcatcctgtcccttgctgattcccacacggagttcttcgatgcctgcgaggttctcctctccgccagctcttctgagaatgagggctcagaggaggaggagtcctgtaccagtgaaatcaccaccagcctgtctgaggagatgctggacctcaggggagctgagcgctgtcagaaaggggggtgtgttccagggagacccatggggccaccccgccgtcgctgcctgccggcggccagcgggcctggggctgacgtgagcctgtggaacattctgcgcaacaacatcggcaaagacctgtccaaggtgtcaatgcctgtgcagctcaacgagccgctcaacactctgcagcggctctgcgaggagctggagtacagcagcctcctggaccaggccagccgcatcgccgacccctgcgagcgcatggtgtacatcgcagcctttgctgtctcggcctactcctccacataccaccgagccggctgcaagcccttcaaccctgtcctgggggagacctacgagtgtgagcggcctgaccgaggcttccgcttcatcagtgagcaggtctcccaccacccccctatctcggcctgccatgcagagtctgagaacttcgccttctggcaagatatgaagtggaagaacaagttctggggcaaatccctggagattgtgcctgtgggaacagtcaacgtcagcctgcccaggtttggggaccactttgagtggaacaaggtgacatcctgcattcacaatgtcctgagtggtcagcgctggatcgagcactatggggaggtgctcatccgaaacacacaggacagctcctgccactgcaagatcaccttctgcaaggccaagtactggagttccaatgtccacgaggtgcagggcgctgtgctcagtcggagtggccgtgtcctccaccgactctttgggaagtggcacgaggggctgtaccggggacccacgccaggtggccagtgcatctggaaacccaactcaatgccccccgaccatgagcgaaacttcggcttcacccagtttgccttggagctgaatgagctgacagcagagctgaaacggtcgctgccttccaccgacacgagactccggccagaccagaggtacctggaggaggggaacatacaggccgctgaggcccagaagagaaggatcgagcagctgcagcgagacaggcgcaaagtcatggaggaaaacaacatcgtacaccaggctcgcttcttcaggcggcagacggatagcagcgggaaagagtggtgggtgaccaacaatacctactggaggctgcgggccgagccaggctacgggaacatggatggggccgtgctctggtagccctggccccgggggcaggaggctctggttcctcactcctcctgcctccaccccctaccatggacacatgggtgaggccgggctccccgcctcactgcccttgagaccaaaggggcagccctggccctccctccctcccgtctcagctcagcggatcccccagagtggaggaggcctctccatgaggaggggagcagcccaaggcacctgtcctctgacccaccggcagcgagtgcgcaggtgtgagtgtaagttcatgtaggagagtgtatgcgtgtgcgccctcgatctcttgcaggcaagcagggctccctcatgtagcccggccctgtccctgctgggggtccaccacagtcgctgctctttctcacagtctgcctctgatgagggcgaattgctatgacattccaagctccaataaagactgtcccagactttgaaaaaaaaaaaa

SEQ ID NO: 130 - DNA, 7254 bp, Homo sapiens
  CDS (338)..(5986)
acgcgggggagtgcagctggcaccatgggtggtgctccagagcaacttctgcttgctctgagccccctggccctgcctcccctttcaccatgtttcctctgacaagattttaagtacagcaattcaagaagatttctcctcctaaacgacatttatctgaagtctattgcctcttgattgctggaaaagaatcttaaaatcatttcaaaagtaacttataaacaaacttattaaaagtgatgaaaggagcattgaaattaattagcactaatttttcactgtgccaaagtgtgcagtgtccttcagaggaaacaataacagatctggtgagtgtgccatgccagtggggagaattgaatgtccctcatctccctctttccctagggacattagtcatgagtgccgagtgtgcggggtcacagaagtgggtctttctgcatatgcaaagcacatttctggccagttgcacaaagataacgttgatgcccaggaaagagaagatgatggaaaaggagaggaagaggaagaagattattttgacaaggaactcattcagttaataaaacaaaggaaagaacaaagtcgacaagatgaaccttccaatagcaaccaagaaataaactctgatgacagacgaccccaatggagacgagaagaccgaattccttaccaagacagagagagttacagtcagcctgcatggcatcatcgtggacctccacagcgggattggaaatgggaaaaagatggctttaataatactaggaaaaacagctttccacattctttgaggaatggtggtggaccaagaggacgttccgggtggcataagggtgttgcaggaggctcctcgacttggtttcacaaccatagtaattctggaggtggttggctttcaaatagtggagcagtagattggaatcataatggtacaggaaggaattccagttggctttctgaaggaacaggtggcttttccagttggcatatgaacaacagtaacggaaactggaaatccagtgtacgtagtacaaataattggaattacagtggccctggagacaaatttcaaccaggcagaaacagaaattctaactgtcaaatggaagacatgactatgctatggaacaagaaatctaataagtcaaacaaatacagtcacgacagatataattggcagcggcaagaaaatgacaaacttggtacagttgccacatatagaggtccttctgaaggatttacaagtgataaatttccttcagaaggcttactcgacttcaattttgagcagctggaaagccaaaccactaaacaagcagacactgctacttccaaagttagtggaaagaatggcagtgcggcaagggaaaagcctcgtcgctggacgccttacccttctcagaagactctggatttacagtcgggattgaaagacatcactggtaacaagtcagaaatgatagagaaacctctctttgattttagcttgataactacaggaatacaggagccccaaactgatgaaacacgtaattccccaacacagaaaacacaaaaaaaaatacatactggatctcttaatcacaaggcctcttctgattccgctgcttccttcgaggtggtgagacagtgccccactgcagaaaaacctgaacaagagcatacaccaaataaaatgccatcattgaaatccccactccttccatgtccagccactaaatcattgtctcaaaagcaagatccaaagaatatctcaaaaaacaccaaaacaaattttttttcccctggagaacactcaaatccctcgaacaagcccactgtggaagataaccatggtccttacatatccaaactgcgtagttcatgtcctcatgttttaaaagggaataaaagtacatttggctctcaaaagcaatctggtgataatttaaatgatactttacgaaaggccaaagaggtgctacagtgtcatgagtcattgcaaaatccacttcttagcacttctaaaagtaccaggaactatgcaaaagcaagtagaaatgtagaagaatctgaaaaagggtctttgaaaattgagtttcaagtgcacgcactagaagatgaaagtgatggagagacatctgacacggaaaagcatggaacaaaaattggaaccctaggttctgcaactacagaattgttatctggcagcactcgaactgctgatgagaaagaggaggatgaccgcatcctgaagacttctagagagctatccacttccccatgtaatcccatagttcgccagaaagaatctgaattacaaatgacatctgcagccagtccacaccctggcttattgctagacttgaaaacctctctagaagatgcacaggttgatgactctattaaatctcatgtatcttatgaaacagaaggctttgagagtgctagcttggatgcagagcttcaaaaaagtgacatcagtcagccctcgggccctctcctgcctgaactaagtaagcttggctttcctgcctcacttcagagggatctaacccggcacattagtttgaagagcaaaactggagtacaccttcctgagccaaacctcaatagtgcccgccgcattcgcaatattagcggtcaccgaaagagtgagacagagaaggagtctgggctcaagccaaccctacggcagattctaaatgcatctcggagaaatgtcaactgggaacaggtcattcagcaagtaaccaagaaaaagcaagagctgggcaaaggcttacccaggtttggcatagaaatggtaccccttgttcaaaatgaacaagaagccttagatttggatggggaacctgatctgtccagtctagaaggattccagtgggaaggtgtttccatttcctcgtcccctggcttggcaagaaagcgaagcctttctgagagcagcgtgatcatggacagagctccttctgtgtatagcttcttcagtgaggaaggtacaggcaaagaaaatgagccccagcagatggtttcacctagtaactcattgagggctggacagagccagaaagcaaccatgcacctcaaacaagaagtgacacctcgggctgcctccctccgaacaggtgaaagggctgaaaatgttgctacccaaaggcgacatagtgcacaattatcctctgaccatataatacctttgatgcatttggcaaaagacttgaacagccaggagaggtctataccaccgtcagagaatcagaattcccaggagagtaatggagagggaaactgtctgtcatcaagcgcatcctcagcccttgcgatctccagtttagcggatgcagccacagatagtagctgtacctctggtgctgaacaaaatgatggccaaagtattagaaagaaacgaagagccactggagatggatcttctcctgaactcccaagtcttgagagaaaaaataaaagaaggaaaattaaaaaaaaaaaagaacgttctcaggttgaccagctgctgaatatttctttaagggaggaagaacttagtaagtcattgcagtgcatggataacaatcttctgcaagcccgtgcagcccttcagacagcttatgtggaagttcagaggctacttatgctcaagcagcagataactatggagatgagtgcactgaggacccatagaatacagattctacagggattacaagaaacatatgaaccttctgagcacccagaccaggttccctgtagcctcacacgagaacgaaggaacagtagatctcaaacatccattgatgccgcactgctgcccactccctttttcccactttttctggagcctccatcttcccatgtgtctccatcacccaccggagcctctcttcaaataaccacgtctcctactttccaaacccatggcagtgtccctgctccagactcatcagttcagattaaacaagagcccatgtctcctgaacaagatgagaatgtgaatgctgtgccaccaagctctgcctgcaatgtgtccaaggaattactggaagctaatagagagatcagtgacagttgtccagtttatccagtcatcactgctagattgtccttaccagagtcaacagaaagtttccatgagcctagccaagaactgaagttttctgtggagcaaagaaataccagaaacagagaaaactctccctcttcccaatcagctggtctttctagcataaataaagaaggggaagagccaaccaaaggcaatagtgggtctgaagcctgtaccagttcttttctaagattgtcttttgcttcagaaacccctttggagaaggaaccccactctccagctgaccagcctgaacaacaggcagaatccactttgacatcagctgagactaggggaagcaagaaaaagaagaaactccggaagaagaaaagtctacgggctgcccatgttcctgagaatagtgacactgaacaggatgttttgactgttaaacctgtaaggaaagtaaaagctggaaagttaattaaaggggggaaagtaacaacctccacttgggaagacagcaggactggtcgggagcaggagagtgtcagagatgagccagatagtgactcgtctctggaagtcctagaaattcctaatcctcagttagaagtagtagccattgattcttcagaatcaggagaagagaaaccagacagcccatctaaaaaggatatttggaactctacagagcaaaacccactagaaacgtctcgttctgggtgtgatgaagttagctctaccagtgaaattggcactcgctataaagatggcatccctgtaagtgtggcagaaactcagactgtgatctcctccataaaaggatcaaagaattcttcagaaatatcttcagagccaggagatgatgatgaacccacagaaggaagctttgagggacaccaagctgccgtaaatgcaattcagatatttgggaacttgctatatacctgttcagcagataaaactgttcgggtttataatctggtgagtcggaaatgtattggtgtctttgagggtcatacctccaaagttaactgcctcctggttactcagacctccgggaagaatgctgccctttacaccgggtccagtgaccataccatccgctgctataatgttaagagccgagagtgtgtggagcagttacagctggaagaccgggtcctctgcctccacagtagatggcgaatcctctatgcgggactggcaaatggcactgtggtcaccttcaacataaagaacaacaaacgacttgagatctttgaatgccatggccctcgggcagtcagctgtcttgctacagctcaggaaggtgcccgaaaactgctggtcgtggggtcttatgactgcacaattagtgtacgcgatgcccggaatggactgctcctcagaactctggagggccatagcaaaaccattctttgcatgaaggtggtgaatgatctcgtgttcagtggctccagtgatcagtcagtccatgctcacaacattcacactggtgagctcgtgcggatctataaaggtcacaatcatgcagtgactgtggtgaatatcctaggaaaagtgatggtgactgcttgcctggataaatttgttcgtgtctatgaattacagtctcatgatcgattacaagtttatggaggacacaaagacatgattatgtgtatgaccatccataaaagcatgatttacactggctgttatgatggcagtattcaggccgtgaggcttaatctgatgcagaattaccgctgttggtggcatggttgctctctgatatttggcgttgtagatcatttaaaacaacacttgctgaccgaccacactaatcccaacttccagactctgaaatgtcgctggaagaactgcgatgcttttttcactgctaggaaaggatccaaacaggatgctgcaggacatattgaacgacatgctgaagatgacagcaaaattgattcatgaagttttttgcctcccacgttgggaagtcattagttgaactattttcacattggccccccacacaggccactctcttccctttcttggtgaagtaaggaaggagaaagtggttactagccaggcatacccctagcataagtctgggcagctctatgggatgataaattacacttttaagttcttgctggaggttttaaatagatttagacaaatgttaaggaaccatacttctctgggacagcatggcatatagtgatatatgctatttgcgttctccagatgtttattgaagatacagatcctaattggttacccagtttgaccctaatcatatgtatattttattgatttcagtttgcaatttttaatttatgttcttatgatggtttaaacctatagtcaggcttttaagtacaagtttgtttaagtgccagactttgaggatcagttttaatttctccatttgtaatagctgggtatttaaactggaagcaaatagttttctttcttaacaattatgtgcagtgtgtgtcactgttttcttgctttatagatagagctggctttaagtgctaaaggacacagtagatttttgacaaacagtggctgctctgctgactatcttttaggaattcaggaagcaaatcacatagtgacaagtccttacagacaccacttctagtaaatctctgtaaatgtggatagaaagctcagtgtgaggcagtgcgtagacctaacgtctacctttacatctgctgttgaacctgggcactacctgttacagatcctgtcaggctgttgaactggaggtgtacctttatcttcctttctagtgtctgaccctgcaagcctaatgttggtttgaacccttttggtttgttcagttgccagcctccatctctcccactgtatggccgtgcctagaccgatggcagccatcgaatattcctctgggctcacggggtgttttccacccccctgcagcaactaagatggtgggggagagggggttagaataaagcatctgaatacagttttcaggacctcaagcagacttcctagagacttgtttctgagacagttctttgccttcacttccctgctagctgggaaagaagagtggagcagagactctgcctggccactgagaacagccaaattcacaaaccctcagtggggctttgtttttggattttctccggactcatcagtaaacctgtagaagtgtcgctttccagccttttgtttctggatcctcaaaactc

SEQ ID NO: 131 - DNA, 1868 bp, Homo sapiens
  CDS (352)..(1041)
cggacgcgtggggcagtctatttcatttgcctcttttgggatcctgatactacagactatgttgcctacgtagctaaagatgcagttaatcaacgagcctgtcacatattggaatgccacaatggaatggcccaagacgtcataagtaccatagggcaggcttttgaactccggattaaacagtacttgaaaaatccttctttgaatacttcttgcgaaagcgaggaggtgcatattgatagccatgccgaggagagagaagatcatgaatattacaatgaaattccagggaagccgccaccagtaagtggcgtttcagatatgcggatcaaagttcaagccacggaacaaatggcttactgccccatacagtgtgaaaagttgtgctatttgcctggaaactccaagtgcagcagtgtatatgagaactgtttagaacaaagcagggcaataggtaatgtccatccaagaggggtgcagtcccagcgagatacctcattattgaagcacacgtgccgagtggatctctttgatgacccctgctacattaatacacaggctcttcaaagtacacctggctctgctggaaatcaaaggtcagcccaaccactggggagcccatggcactgcggaaaggcaccagaaactgttcagccgggtgccacagcccagcctgccagctcacattctttgccacacattaagcagcagctgtggagcgaagaatgctatcatggcaagctgagcaggaaggcggcagagagcctcttggtaaaggatggggactttttggttcgagagagtgcaacatcccctggccaatatgtgctgagtggactacagggaggccaagcaaaacatcttctcctggtggatcctgaaggcaaggtgaggaccaaggatcatgtatttgataatgtcggccaccttatcagataccatatggataacagtttgccaatcatctcctctggaagcgaagtaagccttaaacaaccagtgagaaaagataataatccagcacttttgcattccaacaaatgacagtattgaagcaccatcacactgatatttcaagaaaccccattttgtattaggacacaaagataatttaaactttgtttatagataaaatagagcacaaactgtgaagtgcatctttccaagaccatcatggaccaggtcctctataaaatgaagaactaacaaaaattagtcttcagaaatgaaaatcagaaaagaggaagagggttggtcattttaaaagaaattatatgtatgcacggatgtcactttttaaggccatattgcattgataacaagctaaaagcacaactaaaatttcacatgctaacgacaacttgaatgaactgctggggcagtggtatgtgcctttcaacttgataatttgggggacattttcatattgggagattaattctaagtatcttcatgttctatgactatagaaccatttgccaaaaaaaaaaagcttttcttgctacaaaaaataagcaattttcttgagccttattgactttattacattttctgtttagcagcatttttcactgcaatgttaaaataaatatgacattgaattcgaactgtgtgtatgtcagtggaatcaaatcaaaagccactaacatggctgtctgtttcactggactgtcccatttgctggttaaaaggattggggcccaaatcctctggcctagcatttctcagtgtttgctattcagactgtctaaatacagcatgtgacaagctgaagaagccaaatctagcagtcatttctgatttcattatattctccccctcttcctgctaaaaagacaaaaaacaaaaaaacaaaaaaaacaaaaaaa

SEQ ID NO: 132 - DNA, 1523 bp, Homo sapiens
  CDS (130)..(807)
aaaatgtcgtcagagaatggcgactccggtatgaagggggcccagctcagttccggggcctctaagtttcctccagcagcagagcctggggggctgcaggagcaggctgggagggaagaagccttcaacatggactctgcctactcagaacaagctgcggtgctcctgcagaggagcaggccatcccggggaggcacctctgcctggggcaagtgttccctgccgaagtttaccgtccccaaaggcagacttggcgtgacgaggataggagacttgtccctgcaggatatgaggaaggtaccttctctggccctcatagagctgaccgcgctctgtgacatcctcggcttggacctgaagaggagcaaggcggggaagtggaaagcggcagaaactcgcctctttggtgtgccccttgacagcctgctagaagctgaccacaaagtcctccccagcacacaggtcccgctggtccttcaagccctgctgtcctgtttggaaaagagaggactggacatggaaggcattctcagggtgcccggatcccaggccagggtcaaggggctggaacagaaactggagagagacttctatgctggcctttttagctgggacgaggttcatcacaatgacgcctctgatttgctcaaaaggttcatccggaagctgccgacacctttgctcacggctgagtacctcccggccttcgccgtggtgcctagcactgctggaattcctcaggaaggtggtggcccgggaacagcacaacaagatgactctgaggaatgtttccaccgtgatggcccctaacctctttctgcaccaagggcggccccccaagctccccaaaggcaaggagaagcagctggcagaaggggcagccgaggtggtgcagataatggtgcactaccaggatctgctgtggacggtcgcctctttcctggtcgcccaggtgcgaaaactgaacgacagtagcagcaggcgcccccagctctgcgacgcaggcctcaagacttggctgcggaggatgcacgcagacagggacaaggcgggggacggcctcgaggcgactcccaaggtggcaaagatccaggtggtctggcctatcaaggaccccttgaaggtgcctctcacccccagcaccaaagtggcccacgtcctgaggcagttcacagagcacctcagccctggttccaagggtcaagaagacagtgaggacatggacagcctccttctacaccataggtccatggagtcagccaacatcctcctctatgaagttggagggaatatcaatgagcatcgcctggacccagatgcctacctcttagatctgtaccgtgccaacccgcatggtgagtgggtccttaaacagaaccccacctaaaccctgcgagtctcaggagcagcctggatgcctcctcctctcccctgctggctctgtgtccatgtacccagcatgagaacaaagctattccaggggagggtctgagttttattccaaggcttccttttctgaaatg

SEQ ID NO: 133 - DNA, 1838 bp, Homo sapiens
  CDS (450)..(1760)
ggccccaggagaggcagagagtgagggaaagggcctggccggcatgcacagataggatcacggtcctgggagaattcctgctcttatagtctaacctaccatggcttctcttttctcaaggctccctcatgctgccctttggccctagtggctggtttccagggctgaggggactgagtgagctgcctgagaaaagagggtagggaacagaaaagccagccaggagctgtgggaggaaacgccctcagtaaagatgaccgcggtcactgttatctaaacgcaagtgaagccgagtcacaggacccggatgttgtcagttcgacggtaaacgaccctgccagcttccaagagggcggcttcactgtgcgaataggtgagaagccaagaaggaggcgcgctggagttacttccgcccggttctccttcccgcagtctgcagccggagtaagatggcggcgctgagggctttgtgcggcttccggggcgtcgcggcccaggtgctgcggcctggggctggagtccgattgccgattcagcccagcagaggtgttcggcagtggcagccagatgtggaatgggcacagcagtttgggggagctgttatgtacccaagcaaagaaacagcccactggaagcctccaccttggaatgatgtggaccctccaaaggacacaattgtgaagaacattaccctgaactttgggccccaacacccagcagcgcatggtgtcctgcgactagtgatggaattgagtggggagatggtgcggaagtgtgatcctcacatcgggctcctgcaccgaggcactgagaagctcattgaatacaagacctatcttcaggcccttccatactttgaccggctagactatgtgtccatgatgtgtaacgaacaggcctattctctagctgtggagaagttgctaaacatccggcctcctcctcgggcacagtggatccgagtgctgtttggagaaatcacacgtttgttgaaccacatcatggctgtgaccacacatgccctggaccttggggccatgacccctttcttctggctgtttgaagaaagggagaagatgtttgagttctacgagcgagtgtctggagcccgaatgcatgctgcttatatccggccaggaggagtgcaccagttgctgaccaacaataggatctggcgaaatcggacaattgacattggggttgtaacagcagaagaagcacttaactatggttttagtggagtgatgcttcggggctcaggcatccagtgggacctgcggaagacccagccctatgatgtttacgaccaggttgagtttgatgttcctgttggttctcgaggggactgctatgataggtacctgtgccgggtggaggagatgcgccagtccctgagaattatcgcacagtgtctaaacaagatgcctcctggggagatcaaggttgatgatgccaaagtgtctccacctaagcgagcagagatgaagacttccatggagtcactgattcatcactttaagttgtatactgagggctaccaagttcctccaggagccacatatactgccattgaggctcccaagggagagtttggggtgtacctggtgtctgatggcagcagccgcccttatcgatgcaagatcaaggctcctggttttgcccatctggctggtttggacaagatgtctaagggacacatgttggcagatgtcgttgccatcataggtacccaagatattgtatttggagaagtagatcggtgagcaggggagcagcgtttgatcccccctgcctatcagcttcttctgtggagcctgttcctcactggaaattggcct

SEQ ID NO: 134 - DNA, 850 bp, Homo sapiens
  CDS (331)..(780)
tattcaggtctctgtcgagcagcggacgccggtctctgttccgcaggatggggtttgttaaagttgttaagaataaggcctactttaagagataccaagtgaaatttagaagacgacgagagggtaaaactgattattatgctcggaaacgcttggtgatacaagataaaaataaatacaacacacccaaatacaggatgatagttcgtgtgacaaacagagatatcatttgtcagattgcttatgcccgtatagagggggatatgatagtctgcgcagcgtatgcacacgaactgccaaaatatggtgtgaaggttggcctgacaaattatgctgcagcatattgtactggcctgctgctggccccgcaggcttctcaataggtttggcatggacaagatctatgaaggccaagtggaggtgactggtgatgaatacaatgtggaaagcattgatggtcagccagaagtacatcggaagcacatcatgggccagaatgttgcagattacatgcgctacttaatggaagaagatgaagatgcttacaagaaacagttctctcaatacataaagaacagcgtaactccagacatgatggaggagatgtataagaaagctcatgctgctatacgagagaatccagtctatgaaaagaagcccaagaaagaagttaaaaagaagaggtggaaccgtcccaaaatgtcccttgctcagaagaaggatcgggtagctcaaaagaaggcaagcttcctcagagctcaggagcgggctgctgagagctaaacccagcaattttctatgattttttcagatatagataataaacttatgaacagcaactaaaaaaaaa

SEQ ID NO: 135 - DNA, 1787 bp, Homo sapiens
  CDS (169)..(1125)
tcaacttcttctctttctccttctccttcttcctctcttcctctcctccttctcctccttctcttcctcctcctgctcctcctcttcctcctcctccttctccttcttctccctcttttttttttttgacggtctcacttccattgcccaggagcagcgttccgcgtcatggggatttggcagcgtctgctgctttttggtggggtgtcgctccgggctggtggcggggccactgccccgcttgggggaagccgagcgatggtttgtgggcgccagttgtctggcgccgggagtgagaccctaaaacaaagaagaacacaaatcatgtcccgaggacttccaaagcagaaaccgatagaaggtgttaaacaagttatagttgtggcttctggaaagggtggagtcggaaaatctactacagcagtgaatcttgcacttgcactagcagcgaacgattcgtccaaggccattggtttgctagatgtggatgtgtatggaccttcagttccaaagatgatgaatctgaaaggaaatccggaattatcacagagcaacctaatgaggcctctcttgaattatggtattgcttgtatgtctatgggctttctggttgaagaaagtgaaccagtagtttggagaggccttatggtaatgtcggccattgagaaattgttgaggcaggtagattggggtcaactggactacttagttgtagacatgccaccaggaactggagatgtgcagttatcagtctcacagaatattcctataacaggtgctgtgattgtctccacgccccaggacatcgcattgatggatgcacacaagggtgctgagatgtttcgcagagtccacgtgcccgtccttggccttgtccaaaacatgagtgttttccagtgtccaaaatgtaaacacaaaactcatatttttggtgctgatggtgcaaggaaactagcacagacccttggtcttgaagttctaggagacattcccttacaccttaatataagggaagcttcagatacaggccagccaattgtgttttcacagcctgaaagtgatgaggccaaagcttacttgaggattgctgtggaagtggtaagaagattgccatcaccttcagaatgattccccaagtgtcctggaaatttgcctggtactgacattaagaggacctttggaaatcagcaatgtggtgatggaacctacagaaataatagaaatcataactgttttatttctaaggaaagaatgtcttcatatttgacttgctaagctaaggttcacaaaactttgatgtatcaatgttaactgctatatttaggaattttttgaaagctggtgtgtaccacctgcaaagaactgcattttattttattgaattacccctttagaaatcacgagtttatgatgttacaagtccattttgggagagaactgtacactttttgcaggaccacagaattagtaatttaaatgatatactaaatttgtgtatgggcataagtattacgccttcccaccaggcaatttggactgtctttgaatcctgtctttggtactgtcttggacatgttcttaatatgaacctctgcttcttcatctggatcacactataccccagacttaatgaatttcagtctccaggagtggagcctgaacatatgtatttttagtaagaccatgatgatgttgatgatgattctggtaatcatggcagtaagaataatagctaacatttaacaagttaattataattgttcttccatttgtgtgggcgctttgcg

SEQ ID NO: 136 - DNA, 599 bp, Homo sapiens
  CDS (53)..(439)
gaaaagccccagctgggagcagcatcacagaagtccactcattcttggcaggatggcttctcatcgtctgctcctcctctgccttgctggactggtatttgtgtctgaggctggccctacgggcaccggtgaatccaagtgtcctctgatggtcaaagttctagatgctgtccgaggcagtcctgccatcaatgtggccgtgcatgtgttcagaaaggctgctgatgacacctgggagccatttgcctctggggaagggatatacaaagtggaaatagacaccaaatcttactggaaggcacttggcatctccccattccatgagcatgcagaggtggtattcacagccaacgactccggcccccgccgctacaccattgccgccctgctgagcccctactcctattccaccacggctgtcgtcaccaatcccaaggaatgagggacttctcctccagtggacctgaaggacgagggatgggatttcatgtaaccaagagtattccatttttactaaagcagtgttttcacctcatatgctatgttagaagtccaggcagagacaataaaacattcctgtgaaaggcaaaaaaaaaaaa

SEQ ID NO: 137 - DNA, 1053 bp, Homo sapiens
  CDS (184)..(909)
aaggatccttaattaaattaatcccccccccccgagcgggcgctgtgcgtaggaaccgccgggtggccgctgccgatcggggccgacttggggacggaccggaagtgcccgagggcggccgcagaacggtcaatttgagccgcgtcgagctcccctgggacctgtggccgccgcccacagaccatgctcctggggcgcctgacttcccagctgttgagggccgttccttgggcaggcggccgcccgccttggcccgtctctggagtgctgggcagccgggtctgcgggcccctttacagcacatcgccggccggcccaggtagggcggcctctctccctcgcaagggggcccagctggagctggaggagatgctggtccccaggaagatgtccgtcagccccctggagagctggctcacggcccgctgcttcctgcccagactggataccgggaccgcagggactgtggctccaccgcaatcctaccagtgtccgcccagccagataggggaaggggccgagcagggggatgaaggcgtcgcggatgcgcctcaaattcagtgcaaaaacgtgctgaagatccgccggcggaagatgaaccaccacaagtaccggaagctggtgaagaagacgcggttcctgcggaggaaggtccaggagggacgcctgagacgcaagcagatcaagttcgagaaagacctgaggcgcatctggctgaaggcggggctaaaggaagcccccgaaggctggcagacccccaagatctacctgcgggggcaaatgagtctggcgccgcccttcccgcccgttgctgctgtgatccgtagtaataaatgctcagaggactgcaagagagaagataacctcgtgctgattcttggcctcaggccaattcctataggagtcgtataatatcagatcatggataggtgatcctggtgaaatgtgttcgctcacatgcacacacatctagccgaagcatgatatcaagctgggtgctaatgaatacctactcacttacagcgtgccttagtgccgctgcatacgtaaact

SEQ ID NO: 138 - DNA, 954 bp, Homo sapiens
  CDS (184)..(813)
aaggatccttaattaaattaatcccccccccccgagcgggcgctgtgcgtaggaaccgccgggtggccgctgccgatcggggccgacttggggacggaccggaagtgcccgagggcggccgcagaacggtcaatttgagccgcgtcgagctcccctgggacctgtggccgccgcccacagaccatgctcctggggcgcctgacttcccagctgttgagggccgttccttgggcctctctccctcgcaagggggcccagctggagctggaggagatgctggtccccaggaagatgtccgtcagccccctggagagctggctcacggcccgctgcttcctgcccagactggataccgggaccgcagggactgtggctccaccgcaatcctaccagtgtccgcccagccagataggggaaggggccgagcagggggatgaaggcgtcgcggatgcgcctcaaattcagtgcaaaaacgtgctgaagatccgccggcggaagatgaaccaccacaagtaccggaagctggtgaagaagacgcggttcctgcggaggaaggtccaggagggacgcctgagacgcaagcagatcaagttcgagaaagacctgaggcgcatctggctgaaggcggggctaaaggaagcccccgaaggctggcagacccccaagatctacctgcgggggcaaatgagtctggcgccgcccttcccgcccgttgctgctgtgatccgtagtaataaatgctcagaggactgcaagagagaagataacctcgtgctgattcttggcctcaggccaattcctataggagtcgtataatatcagatcatggataggtgatcctggtgaaatgtgttcgctcacatgcacacacatctagccgaagcatgatatcaagctgggtgctaatgaatacctactcacttacagcgtgccttagtgccgctgcatacgtaa

SEQ ID NO: 139 - DNA, 882 bp, Homo sapiens
  CDS (184)..(738)
aaggatccttaattaaattaatcccccccccccgagcgggcgctgtgcgtaggaaccgccgggtggccgctgccgatcggggccgacttggggacggaccggaagtgcccgagggcggccgcagaacggtcaatttgagccgcgtcgagctcccctgggacctgtggccgccgcccacagaccatgctcctggggcgcctgacttcccagctgttgagggccgttccttgggcaggcggccgcccgccttggcccgtctctggagtgctgggcagccgggtctgcgggcccctttacagcacatcgccggccggcccaggtagggcggcctctctccctcgcaagggggcccagctggagctggaggagatgctggtccccaggaagatgtccgtcagccccctggagagctggctcacggcccgctgcttcctgcccagactggataccgggaccgcagggactgtggctccaccgcaatcctaccagtgtccgcccagccagataggggaaggggccgagcagggggatgaaggcatctggctgaaggcggggctaaaggaagcccccgaaggctggcagacccccaagatctacctgcgggggcaaatgagtctggcgccgcccttcccgcccgttgctgctgtgatccgtagtaataaatgctcagaggactgcaagagagaagataacctcgtgctgattcttggcctcaggccaattcctataggagtcgtataatatcagatcatggataggtgatcctggtgaaatgtgttcgctcacatgcacacacatctagccgaagcatgatatcaagctgggtgctaatgaatacctactcacttacagcgtgccttagtgccgctgcatacgtaaact

SEQ ID NO: 140 - DNA, 2139 bp, Homo sapiens
  CDS (90)..(1283)
ggtctaggggggaagtcaccaagaacgcaccggaggtccttgcccgccctggaaaacgccctctgcggtgaaggagagaccacactgccatgcctccctctgggccccgaggaaccctccttctgttgccgctgctgctgctgctcctgcttcgcgccgtgctggctgtccccctggagcgaggggcgcccaacaaggaggagacccctgcgactgagagtcccgacacaggcctgtactaccaccggtacctccaggaggtcatcgatgtactggagacggatgggcatttccgagagaagctgcaggctgccaatgcggaggacatcaagagcgggaagctgagccgagagctggactttgtcagccaccacgtccgcaccaagctggatgagctcaagcgacaggagtttgaacacctggaccctcagaaccagcatacattcgaggcccgcgacctggagctgctgatccagacggccacccgggaccttgcccagtacgacgcagcccatcatgaagagttcaagcgctacgagatgcttaaggaacacgagagacggcgttatctggagtcactgggagaggagcagagaaaggaggcggagaggaagctggaagagcaacagcgccggcaccgcgagcaccctaaagtcaacgtgcctggcagccaagcccagttgaaggaggagctggaggcactcttcaccaaggagctggagaaagtgtacgacccaaagaatgaggaggacgacatgcgggagatggaggaggagcgactgcgcatgcgggagcatgtgatgaagaatgtggacaccaaccaggaccgcctcgtgaccctggaggagttcctcgcatccactcagaggaaggagtttggggacaccggggagggctgggagacagtggagatgcaccctgcctacaccgaggaagagctgaggcgctttgaagaggagctggctgcccgggaggcagagctgaatgccaaggcccagcgcctcagccaggagacagaggctctagggcggtcccagggccgcctggaggcccagaagagagagctgcagcaggctgtgctgcacatggagcagcggaagcagcagcagcagcagcagcaaggccacaaggccccggctgcccaccctgaggggcagctcaagttccacccagacacagacgatgtacctgtcccagctccagccggtgaccagaaggaggtggacacttcagaaaagaaacttctcgagcggctccctgaggttgaggtgccccagcatctgtgatcctccgggaccccagccctcaggattcctgatgctccaaggcgactgatgggcgctggatgaagtggcacagtcagcttccctgggggccggtgtcatgttgggctcctggggcgggggcacggcctggcatttcacgcattgctgccaccccagatccacctgtctccactttcacagcctccaagtctgtggctcttcccttctgtcctccgaggggcttgccttctctcgtgtccagtgaggtgctcagtgatcggcttaacttagagaagcccgccccctccccttctccgtctgtcccaagagggtctgctctgagcctgcgttcctaggtggctcggcctcagctgcctgggttgtggccgccctagcatcctgtatgcccacagctactggaatccccgctgctgctccaggccaagcttctggttgattaatgagggcatggggtggtccctcaagaccttcccctaccttttgtggaaccagtgatgcctcaaagacagtgtcccctccacagctgggtgccaggggcaggggatcctcagtatagccggtgaaccctgataccaggagcctgggcctccctgaacccctggcttccagccatctcatcgccagcctcctcctggacctcttggcccccagccccttccccacacagccccagaagggtcccagagctgaccccactccaggacctaggcccagcccctcagcctcatctggagcccctgaagaccagtcccacccacctttctggcctcatctgacactgctccgcatcctgctgtgtgtcctgttccatgttccggttccatccaaatacactttctggaacaaaaaaaaa

SEQ ID NO: 141 - DNA, 1801 bp, Homo sapiens
  CDS (571)..(1293)
ggtcgacccacgcgtccgcccacgcgtccgctggactgtgggttgggggcagcctcagcctctccaacctggcacccactgcccgtggcccttaggcacctgcttggggtcctggagccccttaaggccaccagcaaatcctaggagaccgagtcttggcacgtgaacagagccagatttcacactgagcagctgcagtcggagaaatcagagaaagcgtcacccagccccagattccgaggggcctgccagggactctctcctcctgctccttggaaaggaagaccccgaaagacccccaagccaccggctcagacctgcttctgggctgccatgggacttgcggccaccgccccccggctgtcctccacgctgccgggcagataagggcagctgctgcccttggggcacctgctcactcccgcagcccagccactcctccagggccagcccttccctgactgagtgaccacctctgctgccccgaggccatgtaggccgtgcttaggcctctgtggacacactgctggggacggcgcctgagctctcagggggacgaggaacaccaccatgccccggggcttcacctggctgcgctatcttgggatcttccttggcgtggccttggggaatgagcctttggagatgtggcccttgacgcagaatgaggagtgcactgtcacgggttttctgcgggacaagctgcagtacaggagccgacttcagtacatgaaacactacttccccatcaactacaagatcagtgtgccttacgagggggtgttcagaatcgccaacgtcaccaggctgagggcccaggtgagcgagcgggagctgcggtatctgtgggtcttggtgagcctcagtgccactgagtcggtgcaggacgtgctgctcgagggccacccatcctggaagtacctgcaggaggtgcagacgctgctgctgaatgtccagcagggcctcacggatgtggaggtcagccccaaggtggaatccgtgttgtccctcttgaatgccccagggccaaacctgaagctggtgcggcccaaagccctgctggacaactgcttccgggtcatggagctgctgtactgctcctgctgtaaacaaagctccgtcctaaactggcaggactgtgaggtgccaagtcctcagtcttgcagcccagagccctcattgcagtatgcggccacccagctgtaccctccgcccccgtggtcccccagctccccgcctcactccacgggctcggtgaggccggtcagggcacagggcgagggcctcttgccctgagcaccctggatggtgactgcggataggggcagccagaccagctcccacaggagttcaactgggtctgagacttcaaggggtggtggtgggagccccccttgggagaggacccctgggaagggtgtttttcctttgagggggattctgtgccacagcagggctcagcttcctgccttccatagctgtcatggcctcacctggagcggaggggacctggggacctgaaggtggatggggacacagctcctggcttctcctggtgctgccctcactgtccccccgcctaaagggggtactgagcctcctgtggcccgcagcagtgagggcacagctgtgggttgcaggggagacagccagcacggcgtggccattctatgaccccccagcctggcagactggggagctgggggcagagggcggtgccaagtgccacatcttgccatagtggatgctcttccagtttcttttttctattaaacaccccacttcctttggaaaaaaaaaa

SEQ ID NO: 142 - DNA, 1750 bp, Homo sapiens
  CDS (519)..(1154)
ctctccgggtcgacgatttcgtgctactggccgtgtctcttaggctcctgcttggggacctggagccgcttaaggccaccagcaaatcctaggagaccgagtcttggcacgtgaacatagccatatttcacactgagcagctgcattcggataaagcagagaaagcgtcacccagccccagattccgaggggcctgccagggactctctcctcctgctccttggaaaggaagaccccgaaagacccccaagccaccggctcagacctgcttctgggctgccatgggacttgcggccaccgccccccggctgtcctccacgctgccgggcagataagggcagctgctgcccttggggcacctgctcactcccgcagcccagccactcctccagggccagcccttccctgactcagtgaccacctctgctgccccgaggccatgtaggccgtgcttaggcctctgtggacacactgctggggacggcgcctgagctctcagggggacgaggaacaccacgatgccccggggcttcacctggctgcgctatcttgggatcttccttggcgtggccttggggaatgagcctttggagatgtggcccttgacgcagaatgaggagtgcactgtcacgggttttctgcgggacaagctgcagtacaggagccgacttcagtacatgaaacactacttccccatcaactacaagatcagtgtgccttacgagggggtgttcagaatcgccaacgtcaccaggctgcagagggcccaggtgagcgagcgggagctgcggtatctgtgggtcttggtgagcctcagtgccactgagtcggtgcaggacgtgctgctcgagggccacccatcctggaagtacctgcaggaggtgcagacgctgctgctgaatgtccagcagggcctcacggatgtggaggtcagccccaaggtggaatccgtgttgtccctcttgaatgccccagggccaaacctgaagctggtgcggcccaaagccctgctggacaactgcttccgggtcatggagctgctgtactgctcctgctgtaaacaaagctccgtcctaaactggcaggactgtgaggtgccaagtcctcagtcttgcagcccagagccctcattgcagtatgcggccacccagctgtaacctccgcccccgtggtcccccagctccccgcctcactccacgggctcggtgaggccggtcagggcacagggcgagggcttcttgccctgagcaccctggatggtgactgcggataggggcagccagaccagctcccacaggagttcaactgggtcttagacttcaaggggtggtggtgggagccccccttgggaaaggacccctgggaagggtgtttttcctttgagggggattttgtgccacagcaggggtcagcttcctgccttccatagctgtcatggcctcccctggaacggaggggacctggggaccttaaggtggatggggacacagctcctggctttttctggtgctgccctcactgtccccccgcctaaagggggtattgagcctcctgtggcccccaacagtgagggcccaactgtgggttgcaggggagacagccagcccggggtggcccttttatgaccccccagcctggcagactggggagctgggggcaaagggcggggccaagtgccccatcttgccatagtggatgcttttccagttttttttttttatttaaccccccccttcctttggaaaaaaaa

SEQ ID NO: 143 - DNA, 2851 bp, Homo sapiens
  CDS (121)..(1809)
gaagccttctctggggctgcaaggacctgagctcagcttccgccccagccagggaagcggcaggggaaagcaccggctccaggccagcgtgggccgctctctcgctcggtgcccgccgccatgtgggccgtcctgaggttagccctgcggccgtgtgcccgcgcctctcccgccgggccgcgcgcctatcacggggactcggtggcctcgctgggcacccagccggacttgggctctgccctctaccaggagaactacaagcagatgaaagcactagtaaatcagctccatgaacgagtggagcatataaaactaggaggtggtgagaaagcccgagcacttcacatatcaagaggaaaactattgcccagagaaagaattgacaatctcatagacccagggtctccatttctggaattatcccagtttgcaggttaccagttatatgacaatgaggaggtgccaggaggtggcattattacaggcattggaagagtatcaggagtagaatgcatgattattgccaatgatgccaccgtcaaaggaggtgcctactacccagtgactgtgaaaaaacaattacgggcccaagaaattgccatgcaaaacaggctcccctgcatctacttagttgattcgggaggagcatacttacctcgacaagcagatgtgtttccagatcgagaccactttggccgtacattctataatcaggcaattatgtcttctaaaaatattgcacagatcgcagtggtcatgggctcctgcaccgcaggaggagcctatgtgcctgccatggctgatgaaaacatcattgtacgcaagcagggtaccattttcttggcaggaccccccttggttaaagcggcaactggggaagaagtatctgctgaggatcttggaggtgctgatcttcattgcagaaagtctggagtaagtgaccactgggctttggatgatcatcatgcccttcacttaactaggaaggttgtgaggaatctaaattatcagaagaaattggatgtcaccattgaaccttctgaagagcctttatttcctgctgatgaattgtatggaatagttggtgctaaccttaagaggagctttgatgtccgagaggtcattgctagaatcgtggatggaagcagattcactgagttcaaagccttttatggagacacattagttacaggatttgctcgaatatttgggtacccagtaggtatcgttggaaacaacggagttctcttttctgaatctgcaaaaaagggtactcactttgtccagttatgctgccaaagaaatattcctctgctgttccttcaaaacattactggatttatggttggtagagagtatgaagctgaaggaattgccaaggatggtgccaagatggtggccgctgtggcctgtgcccaagtgcctaagataaccctcatcattgggggctcctatggagccggaaactatgggatgtgtggcagagcgtatagcccaagatttctctacatttggccaaatgctcgtatctcagtgatgggaggagagcaggcagccaatgtgttggccacgataacaaaggaccaaagagcccgggaaggaaagcagttctccagtgctgatgaagcggctttaaaagagcccatcattaagaagtttgaagaggaaggaaacccttactattccagcgcaagggtatgggatgatgggatcattgatccagcagacaccagactggtcttgggtctcagttttagtgcagccctcaacgcaccaatagagaagactgacttcggtatcttcaggatgtaactggaataaaggatgttttctgttggacatgtactgaaaattaacacatgtagtagccttaaaattttagacttctcgaacatgaggctgttacagtaatttttttaacactgtgcattgtacttttctaccttaaaaaaatcagtgaggatatttatttaatgaacatcaattccttttaaattttcttagagaaatttctctgtggctcagttttaccacccataaagcggagacagtaatttatggttatcctttctgacccacaaagtatgaaaagttctgtaatctgtaaactcagttctgtaatctgtattattgagatgattaatataaagttgtattttcactgaaatgattgttttgctggttatgcttggtgatattttagcgggcttatttttgaaaggcatctgttacttcagctggccataaagtgccctcaacactgctgtgcagaccatcaccaccattcatctccagaattggtactcagtaccaaactgcaaactatagcgattcaaacaacagtgctccccaatttcaccactaccacgagcccatgacatctactatatatcatactgagtctgagaaagcgatgtaaccacaatagacacaaaccagacaatacgaaagaataaatacacgactccaccgaagcaacacaacacccagaagatcaaacaagactatgcgccaccacaccacccaaacagcaggaacaaagagaacctaagaaaaacaccacaaacaagaatctacacaacaaacgcaacatcaacaagatagccaaggatagactacacaaaaagccatagaggaacctcggactggtcaccaagagcagaacaaccgacaacacacaatacagtacaaacaagacaaacgctggacaagcgagtaaaaagatgaagaaaaaacgaagaatcaacaacaggagaagtatatgaaaacaacaccaacgcaagaacacaacagtctgaacgacagagacaaatactaaaacgacaaacgtcagctactattaaccgaaaaa

SEQ ID NO: 144 - DNA, 1711 bp, Homo sapiens
  CDS (1252)..(1428)
gagatcatctactcaaagtttattggactgaacaaaggctgaatacagagatccaagccatgaggagtacatgaggtgtggtgcctataagccagggtcggaaactttccagacaaacctagatagctctactaggagggagtcaacgacctattgtatcaattagatcccagcctggacaagggcatgactattgctgtttggggacacgtggctctgtgttgaaggcaatgactgtgtggctgttgccatgtggcctgttctcccctaagccctgaaccaaaggttccaggcccagatgagaaggccactgggaatgcatgccataggggttgatgctggacattccccagccttccattaaatgaaaacattttctataaacttactgctttaaaaaaatgttttaaccaacaaacctaagaactgcaaatgagtttggtatagtataaatattgtcaaatataaaattccaagaaacccatttgagactgatctgatgatctgaagttctaactaatctatcaaactttctaagaaaaggcataggtcaagaaatctttttaaagcaaacattattgcttctgctatagcagagtggagatttggctgagctggtaagaacctcagtgaaaaggtgtcttagcaatgaaagggctgaatccgagattcctctagatgaaaaataaggggaatggtcaagtaaattcctggtactggttctttgctgccctgtaatcaatatggcatctcacccccgacaaccaagccagccacagagagaagtggggttcccagggaaaggggtcggctgaccaccctgacggagctggtgagcacaggtgagctctacctcatttgtctctcattcctcaaagtcttctgtggtttggcttcagtgagggcaaaagaggggagactggagtgaaagtgaactctgcttttaaaatgttctttttatctaaggtgtgcagggtgtgtggatagcaagtttgagtggtaagaaaaatcccagtccagggtctgagctctacctcttaaaactcttcagcttaacaaagtgacccacaggaacagacatgaacatctctacacagggcagggccaaaggtgttcccaggatcctgctagccaagggacaagtcctgattgagggtctagagctcagcagatttatggaggcagcatgcaccctgggagcctgcccagactcctctctggggtttccgttttatctctcaagcttttaagatgccaaaaggaaaagcctttaggaggacgctaaggataacttcgttattcttcagttctctgctcctcctccagctcctctttggtcatcatcttcttgtactggtttcccctcagcttcccggggctgtatttgaaggagaagccttctccgtcctcctcctcaggcccttccgatgatggccccttctcaccatccaagtcctgctcctcttcctgcctcgcctccaccgcctgctcctccgcctccgctggcgccgccgcgggatcccctggcccttcgggctcccccggtcccgcaggctccccgagctcccccagccccgcgggctctccaggctcctccggccccgcgggcgaggccgccggctcgggggcgcaggggcgggacggcgccggggccccggtggcctcggccgggggcgcgggttccgggggcgcgcgggcaggctccgggctc

SEQ ID NO: 145 - DNA, 915 bp, Homo sapiens
  CDS (489)..(635)
gacaatgctaagcttttttgaaatgtctattctttttagatattctgaagtgcctgatatatgtagaaaaaaataacctttgtaaatatctttttgttacaattcatatgaaatgtttggtgggggaatggcccaatcacctgttgagtaatactcattgtgtttgtgcactggttcaggggaggagggggaagtgcagagatctctatgccactgtgcttacagcgaggcaagattaatcattatctctgcgcattttgttttacttgtctgtgtatatagtgtacataaaggacagacaagtcctgatttacaacatctagtctttctagatattaaagaggttgccagtacatgataaaagtagagttagtaaactaatatattttgtacattttgttttagaagtcctaggaaagattgtcttctgaaaatttgagcattcttgcccgctgggttgatggagatgggaagggttctaggccagaatgttcctatttggaagactctttcaaattataactgttgtcacatgtttgcagtttattcaagactgctgtgttcgtagtggacaaatgaactccttacttgaaacatctagtctatctagatgtttagaagtgcccaatgtatgttaaatgtagaggtagtaaaataccacttcgtaaatatctttttgctaaaattcatggggaatgctgtcttttggaaattgaattgtgaagccacctttgtgagcagtatagtactgtctatacttgttcagtggtttagaggagatgggagggaagacattgcaaaagataatatgccagtgtgttcatacttggacattttcagacaccattttttgcatgttttgtgcatgttgttttgctctgtatatagtgtataaaacggacaaatgagtcctaa

SEQ ID NO: 146 - DNA, 2257 bp, Homo sapiens
  CDS (22)..(1071)
gcacgagcaccggcgcggtctatggctgcgacttctctaatgtctgctttggctgcccggctgctgcagcccgcgcacagctgctcccttcgccttcgccctttccacctcgcggcagttcgaaatgaagctgttgtcatttctggaaggaaactggcccagcagatcaagcaggaagtgcggcaggaggtagaagagtgggtggcctcaggcaacaaacggccacacctgagtgtgatcctggttggcgagaatcctgcaagtcactcctatgtcctcaacaaaaccagggcagctgcagttgtgggaatcaacagtgagacaattatgaaaccagcttcaatttcagaggaagaattgttgaatttaatcaataaactgaataatgatgataatgtagatggcctccttgttcagttgcctcttccagagcatattgatgagagaaggatctgcaatgctgtttctccagacaaggatgttgatggctttcatgtaattaatgtaggacgaatgtgtttggatcagtattccatgttaccggctactccatggggtgtgtgggaaataatcaagcgaactggcattccaaccctagggaagaatgtggttgtggctggaaggtcaaaaaacgttggaatgcccattgcaatgttactgcacacagatggggcgcatgaacgtcccggaggtgatgccactgttacaatatctcatcgatatactcccaaagagcagttgaagaaacatacaattcttgcagatattgtaatatctgctgcaggtattccaaatctgatcacagcagatatgatcaaggaaggagcagcagtcattgatgtgggaataaatagagttcacgatcctgtaactgccaaacccaagttggttggagatgtggattttgaaggagtcagacaaaaagctgggtatatcactccagttcctggaggtgttggccccatgacagtggcaatgctaatgaagaataccattattgctgcaaaaaaggtgctgaggcttgaagagcgagaagtgctgaagtctaaagagcttggggtagccactaattaactactgtgtcttctgtgtcacaaacagcactccaggccagctcaagaagcaaagcaggccaatagaaatgcaatatttttaatttattctactgaaatggtttaaaatgatgccttgtatttattgaaagcttaaatgggtgggtgtttctgcacatacctctgcagtacctcaccagggagcattccagtatcatgcagggtcctgtgatctagccaggagcagccattaacctagtgattaatatgggagacattaccatatggaggatggatgcttcactttgtcaagcacctcagttacacattcgccttttctaggattgcatttcccaagtgctattgcaataacagttgatactcattttaggtaccaaaccttttgagttcaactgatcaaaccaaaggaaaagtgttgctagagaaaattggggaaaaggtgaaaaagaaaaaatggtagtaattgagcagaaaaaaattaatttatatatgtattgattggcaaccagatttatctaagtagaactgaattggctaggaaaaaagaaaaactgcatgttaatcattttcctaagctgtccttttgaggcttagtcagtttattgggaaaatgtttaggattattccttgctattagtactcattttatgtatgttacccttcagtaagttctccccattttagttttctaggactgaaaggattcttttctacattatacatgtgtgttgtcatatttggcttttgctatatactttaacttcattgttaaatttttgtattgtatagtttctttggtgtatcttaaaacctatttttgaaaaacaaacttggcttgataatcatttgggcagcttgggtaagtacgcaacttacttttccaccaaagaactgtcagcagctgcctgcttttctgtgatgtatgtatcctgttgacttttccagaaattttttaagagtttgagttactattgaatttaatcagactttctgattaaagggttttctttcttttttaataaaacacatctgtctggtgtggtatgaatttctgaaattctggcttcctatgactcctagttgtgacctaaccagtttttttctcatttaatcaatgtagctattcctatattcagtaacacttacttctatagccttaaatagataattttttttcttctatt

SEQ ID NO: 147 - DNA, 2073 bp, Homo sapiens
  CDS (32)..(628)
gggagcggggcggcgggcgccctgggctggcatggcgtggccctgtatcagccgcctgtgctgcctggcgcggcgctggaaccagctggaccgctccgacgtggcggtgccgctcactctgcacggctactcggacctcgacagcgaggagccgggcacgggcggcgccgcctcgcgcaggggccagcctcccgcgggcgcccgggattccggccgggacgtgccgctcactcagtaccagcgggacttcggcttgtggaccacgcccgccgggcccaaggatccgccgccggggcgcggaccgggggcgggcggccgcaggggcaaatcctccgcgcagtcctccgcgccacctgcgcccggcgcccgcggggtctacgtgctgcccatcggcgacgcggacgcggctgcagcagtgaccacgtcgtacagacaggaattccaggcttggactggagtgaagccctcaagatccacaaagacaaaaccagcccgagtcatcacaacccacacttcgggatgggacagcagccctggggccggcttccaggtcccagaggtgaggaagaagttcactcctaacccctccgccatctttcaggcctcagctccccggattctcaacgtgtgactgcctgcaccgtgacaccatggctgccgacaggacagggctggggagcggcctcaggacccactgccgcggggctgggcgagagcatggcatgggcccctgcgggagggcacagcccctctcaaagctgtcaccagggccaaagtgctggtgtggagcagatgcactgatggacttggcacacccagctcagcctcaagcatcctcttgagaagcctgtggaaggctcctgcgttcgttaactgccatctggccgtctctcagttttgaaatctctgaggagcctgaggatcaagtcagttgggaaccgaattggtccatggaagctgaggaatgtggacacatccggcccttgaaagaaccagttatgtccacttttggtggatttcccaggatgcgtgagcacttgattaatttcataacctacagtgagacccttggctcttcctacaaatggcccctgcagttgaagctgttggaatcttgggccgtcacctgcatgactcatggtgatgctgagtatccaggaggaaatttccagaagaaacagaccgtcagtcacgggcttccacttcacagacctccttatggccaagatgagcctcatgttttaacaaaacagttcttgggattgaatgactcacatttaacttgtggtaggttctaaagattgaatccacattttgttactaatgattttcccgctaacataaggatgatgagcagggcactatcatacacactggctgagaactggaactgtttttgggaaggtggcatttgtctcattccctgaaataccttaaaatgtcctctacaccaacccttccgtctaccctgctcacatgtacagtgacggggaactcaccaccttttgaagaggcagttcattttctttgcaaagctctctcctaacttcctccgtaaattccagccagcatggccacatgggtcacgcctggtgccttcacacatttgaggggtcttcgtctctttttaaagcttagaggtacaagctcaggacagtcttcagtaaggaaatttgtggatttccctttggatctttcttcctctccagcccacaagtggctctagtgagacgagcatttaagctgcaggtggtggcactcgggtctcagagccaccagacgtgcaggtgggacagtggttccagctccggctgcctgtcagcgtccctcccaggtgctagccctggcaggcacagccctcccctcatgccagcaaaggaaatgctcttgatgagaggctcgctttaaagaagcccaaagcgtgtgcttatccaaggggttcagctattcctgacttcacggcttgcatgtttgatttttctaagagaaaagaggctgcctgctgggtgtctgtggaaatgagattaaaaactgtacaatctcagattttactaaaatgcaaaaaaaaaaaaa

SEQ ID NO: 148 - DNA, 1956 bp, Homo sapiens
  CDS (1)..(930)
atggccccggcccgccgccccgccggagcccgcctgctgctcgtctacgcgggcctgctggccgccgccgccgcgggcctggggtccccggagcctggggcgccctcgaggagccgcgcccgcagggagccgccgcccgggaacgagctgccccggggccccggggagagccgcgcggggccggccgctcgtccgccggagcccagtgaggccaaccgccctgctgggctggctgtgttccaggagcccaccgctgagcgtgcacacagcgtcgacccccgggacgcctggatgctcttcgtcaggcagagtgacaagggtgtcaatggcaagaagaggagcaggggcaaggccaagaagctgaagggccccccaggccccatcatcccacccgaggcgctgctgaaggagttccagctgctgctgaaaggtgcggtgcggcagcgggagcgcgcggagcccgaaccctgtacgtgtggccccgccgggccggtcgctgcgagcctcgccccggtctcggccaccgccggggaggacgacgacgacgtgcccgacgccgagggtgccttccgccgcggcccgggcctgaacttgaccagcggccagtacagggcgcccgtggctggcttctacgctctcgccgccacgctgcacgtggcgctcggggagccgccgaggagggggccgccgcgcccccgggaccacctgcgcctgctcatctgcatccagtcccggtgccagcgcaacgcctccctggaggccatcatgggcctggagagcagcagtgagctcttcaccatctctgtgaatggcgtcctgtacctgcagatggggcagtggacctcctgggcgtgtgagcggccaccacaggcccttcctctcaggggcaaatggagcacagatctagacaatgtgtggacagtgtcagagtagcagtggccacatggaggaggaggcccacccggaactctgctcacactggccactgcagttcagcccacagagccactgcaggcaggcctacggacgtgacacgcacgctggtggtcccggagccagggttgattcaggacaccatcttggactctttcctggcctgctcagcacctgcccagatggcctctgcgtctttcctgtgcccagccccaccttttccacctctcttcatgttctcatggagtgcaaagtgcaccagccagggcccctacctgggagagggtcagctgacgcagggctgagggggctgccacagggacgtacgctgtgtgttcttactgcttagaagggacggggtcactcaccactcccctggtctccatctgggctccttggtcttccctgcccctcccctaaccgtgttctacctgccagtggagctgagcactgcctagcctgggccagaggggcactggacaagggcctttgggggacagtaagtctgggcccagcttctagttctaatgtgtgcaagattaactcacaaattcacctcagaaggcctttccaaatgggagctccactcttcccctcctctgcaaatcttcacagccaaggccccttccaccctctccagaggtggatgagatcccttttcccctcccctctgaggtgctgactcactggtaggagccacccaccagaggaaagatctagaacgtctttacagattggagacagccgggcctgctgacccatcatccgaatagctgaagcagagtcttccaccaggggtgccagggcctggctgggtccagcggctctgggatgagcctcccaagcatctttcccacttgggtggccatgcggcgctgacattggacaggtggtggacgagagatggtcccgagaaagggtggtcttgggagggctggacccaagcctggtgtgctcctgtggcagtgatggggcctggggatggggacggcagctctcatgacgacacacaggctgtgagcc

SEQ ID NO: 149 - DNA, 1824 bp, Homo sapiens
  CDS (94)..(1644)
cagggcgcgggcgcccgccctgctctgtgacgcgcggcccgaggcgcacgcagggctcacaccacctgtcctggcctccgacccgggccgactatggcggcgctgcggctcctggcgtcagtgctcgggcgcggggtccccgccggcggctcagggctcgcgctgtcccagggctgcgcccgctgctttgccaccagtccccggctccgtgccaagttctacgcggacccggtggagatggtgaaggacatctctgacggggcgaccgtcatgatcgggggcttcgggctctgcgggatccccgagaacctgatcgccgcgctgctcaggacccgcgtgaaagacctgcaggtggtcagcagcaacgtgggcgtggaggacttcggcctgggcctcctgctggccgccaggcaggtccgtcgcatcgtctgttcctacgtgggcgagaacaccctgtgcgagagccagtacctggcaggagagctggagctggagctcacgccccagggcaccctggccgagcgcatccgcgcggggggcgccggggtgcccgccttctacacccccacgggctacgggaccctggtccaggaagggggcgcccccatccgctacaccccggacggccacctggcgctcatgagccagccccgagaggtgagggagttcaacggcgaccacttccttttggagcgcgccatccgggcagacttcgccctggtgaaagggtggaaggccgaccgggcaggaaacgtggtcttcaggagaagcgcccgcaatttcaacgtgcccatgtgcaaagctgcagacgtcacggcggtggaggtggaagagatcgtggaggtgggggctttccccccagaagacatccacgttcctaacatttatgtagatcgcgtgataaaggggcagaaatacgagaaacgaattgagcgcttaacgatcctgaaagaggaagatggagacgctggaaaggaagaggacgccaggacgcgcatcatcagacgcgcagctctggaatttgaggacggcatgtacgccaatctgggcataggcatccccctgctggccagcaacttcatcagtcccagcatgactgtccatcttcacagtgagaacgggatcctgggcctgggcccgtttcccacggaagatgaggtggatgccgacctcatcaatgcaggcaagcagacggtcacggtgcttcccgggggctgcttcttcgccagcgacgactccttcgccatgatccgagggggacacatccaactaaccatgcttggagccatgcaggtttccaaatacggcgacctggcgaactggatgatccctggcaagaaggtgaaaggcatgggcggtgccatggacttggtgtccagtcagaagaccagagtggtggtcaccatgcagcactgcacaaaggacaacacccccaagatcatggagaaatgcaccatgccgctgaccgggaagcggtgcgtggaccgcatcatcaccgagaaggccgtgtttgacgtgcacaggaagaaagagctgacgctgagggagctctgggagggcctgacggtggacgacatcaaaaagagcacggggtgtgcctttgctgtgtccccgaacctcaggcccatgcagcaggtggcaccctgacgggacctggatctgggcggggtggtgcgctcctcagggcgggtgccaccgggttccccaggggaatacatgtccccagctctgggaggggtttgctactggcctcctactttcctccctaggtggacagtgctcctctagagagctgcgactttaattaaaaacaacaggaaaaca

SEQ ID NO: 150 - DNA, 1362 bp, Homo sapiens
  CDS (230)..(742)
ccgcctctccccgctgcgctccctcgctccttccctgagctcccgggctccggcagcgcgctggcggggcgccgcattgcacactctgggggcgccgcagtgttcgtgggatggggcagcgggctgcagctggcggccggaatccgcgcgcagcccgggtgcaagttctctcctgttgccctgagtgcccactcccaggccctctgtatgagtgacacttcagtctgccatggaacctggccctgctctggcctggctcctgctcctgagcctgctggcggattgtctgaaagctgctcagtcccgagacttcacagtgaaagacattatctacctccatccttcaaccacaccatatcctggtggatttaaatgtttcacctgtgaaaaggcagcagacaattatgagtgcaaccgatgggctccagacatctactgccctcgagagaccagatactgctacactcagcacacaatggaagtcacaggaaacagtatctcagtcaccaaacgctgtgtcccactggaagagtgcttatccactggctgcagagactccgagcatgaaggccacaaggtctgcacttcttgttgtgaaggaaatatctgtaacttgccactgccccgaaatgaaactgatgccacatttgccacgacgtcacctataaatcagacaaatgggcacccacgctgtatgtcagtgatagtgtcctgcttgtggttgtggttagggctcatgttatagtggctcagtggctccatgtgttaatagcgatccatggggatctcgatggtccacagacctgcatgagtcattggcctgacagtaattacacatgtgagacacaacactcttggaggtcatcacagccaagcattgccacttaccatgaggaataaatgttgcttcattgtagccattttgagtctaaccgagactcatcaaagccttctgtcagtacagcccaagttccataccataaacgtttgttttcattccaagaagtagttctgcatttatcgagatctggggttcttaatttggaagaatacatgcatgagatgcagtaggtcctgagactgtaagatattaggagtatgttataggggcatgtatagatgtgggcttttcaggagaaaagtaaccattggtttaaatataatcatgagttcatttgtagctttagaattttaaaacattgactccaaactgaatggactatttccttggaaattctgactgagtccctggaagagtagtaattccaacaattccagccatttgttcaattaattttcccaacattcttctcccagtgctgggaatcacatttcctctgataagtgcagaagacaaaaagg

SEQ ID NO: 151 - DNA, 2117 bp, Homo sapiens
  CDS (223)..(1086)
aatagaaaccctggaaacccggcatgattccgtgtcgacccacgcgtccgagggaactttgtaactgtgaaatactctccatgatttaaaaggctgtggagctccagataaagaatcgtttatctttcttctgaagaaattcctttggttacaagtttaccccataaacggcaacacactcacctccatccaagacagactcaaggtggaggaagcgtggaaatgtgcttccggacaaagctctcagtatcctgggtgccattgtttcttctactcagccgtgttttttctactgagacagacaaaccctcagcccaggacagcagaagccgtgggagttcaggccaaccggcagacctgctacaggttctctctgctggtgaccacccaccccacaaccactcaagaagcctcatcaaaacattgttggagaaaactgggtgcccacggaggagaaacggaatgcaaggagattgcaatctggttagtgaaatagaatggggtcagtgctttgaaccagatgcactattactaatagctggaggaaattttgaagatcagcttagagaagaagtggtccagagagtttctcttctccttctctattacattattcatcaggaagagatctgttcttcaaagctcaacatgagtaataaagagtataaattttacctacacagcctactgagcctcaggcaggatgaagattcctctttcctttcacagaatgagacagaagatatcttggctttcaccaggcagtactttgacacttctcaaagccagtgtatggaaaccaaaacgctgcagaaaaaatctggaatagtgagcagtgaaggtgctaatgaaagtacgcttcctcagttggcagccatgatcattactttgtccctccagggtgtttgtctgggacaaggaaacttgccttccccagactactttacagaatatattttcagttccttgaatcgtacgaataccctccgcctatcagaactagaccaactcctcaacactctctggaccagaagtacttgtatcaaaatgagaaaatccatcaatttcaaaggaaacaaaacaacataataacccatgatcaggactattctaatttctcttcatccatggaaaaagagtctgaggatggtccaatttcctgggatcagacctgcttctctgctaggcagctggtggagatatttctacagaagggcctctcactcatttctaaggaggactttaagcaaatgagtccagggatcatccagcagctcctcagctgctcctgccacttacccaaggaccaacaagcaaagctgccacctaccactctggagaaatacggctacagcacggtggctgtcacccttctcacactgggctccatgctggggacagcgctggtccttttccatagctgtgaggagaactacaggcttatcttacagctgtttgtgggcttggccgtcgggacactgtctggggacgctctgctccaccttatccctcaggttcttggtttacataagcaggaagccccagaatttgggcatttccatgaaagcaaaggtcatatttggaaactgatgggattaattggaggcatccatggatttttcttgatagaaaaatgttttattcttcttgtatcaccaaatgacaagaaaagcccagaagattcacaggcagctgaaatgcctataggcagtatgacagcctccaacagaaaatgtaaagccattagcttgttagcaatcatgattctggttggggacagcctgcataattttgcagatggcctagccataggagcagccttctcatcatcatccgagtcaggagtgaccactacgattgctatcttgtgccatgaaatcccacatgaaatgggagactttgccgtgctcttaagctctggactttctatgaagactgccatcctgatgaattttataagctccctaactgccttcatgggattatacattggcctttccgtgtcagctgatccatgtgttcaagactggatcttcacagtcactgctgggatgttcttatatttatccttggttgaaatggtcgcttgctctcacggccttctgagcaacttctaa

SEQ ID NO: 152 - DNA, 815 bp, Homo sapiens
  CDS (221)..(727)
ttaccatttttcctgtgaagtttcggtgctgttactgatattctgtgagttcgggcagctgagtccattcgcacagcctggtgacacagcaggtgtcacagaaggaccctgtcccagctggtcctgttccactgctatgatgagggcagcctctgatctgtgaccgtgtcttgaggggagaccaggcccttgatcacaagcgtatccataactgtacgtcatggaactccttgtaatgccgacgctgggcttttctcccacctgtatgcagttgctgctgaatttcaggggatgtgatttgaactacagagcatcagaattcatgaaacttaactgtggaggtattttgaaaacaaaatttaagtacaacaacatttgcttatttttagagtcttttatgacatcaagagaaatggtcccagaaagaaaaaaccaagaaaaagaatctgatgatgcctcaactgtgaatgaagagacttctgaggaaaataatgaaatggaggaatctgatgtgtctcaagctgagaaagatttactacattctgaaggtagtgaaaacgaaggccctgaaagtagtggttcttctgactgccgtgaaacagaagaattagtaggatccaattccagtaaaactggagagattctttcagaatcatccatggaaaatgatgacgaagccacagaagtcaccgatgaaccactggaacaagaggggggagtgaaaaattgatgcgcaacattaaatcacccaggcaagaaatgtcagcctctgtcctcgcgctggaatcattcttcaccaccgggtttgcctgaat

SEQ ID NO: 153 - DNA, 1783 bp, Homo sapiens
  CDS (408)..(1427)
  misc_feature (1)...(1783): n = a,t,c or g
ttgccattacccacagaataaagaaaggggccctgttattcaacaataggggaaaagacagagacaatgggaaattgtgcttccgatggggtggggactgagaaggaaaggacagacagacagacagacagggggttgtacagaagaggtccggtttcttgaagcagctggaagtcctggatagttcccacctgaaagtctgtttgcaaaggcaatgcgcactcaggcaccagagggcagaggggctcaagttccagggttttaaggtgcttggaactcccaggagcctggcaaaccttcatccagaacctcttcctcaagcaagacaaaaagctgctaagcactgctccctccgtctctgtgaagagaccagcttctaacagacggtgccgggctgaccccccatcatgccaggctggctcaccctccccacactctgccgcttccttctttgggccttcaccatcttccacaaagcccaaggagacccagcatcccacccgggcccccactacctcctgccccccatccacgaggtcattcactctcatcgtggggccacggccacgctgccctgcgtcctgggcaccacgcctcccagctacaaggtgcgctggagcaaggtggagcctggggagctccgggaaacgctgatcctcatcaccaacggactgcacgcccgggggtatgggcccctgggagggcgcgccaggatgcggagggggcatcgactagacgcctccctggtcatcgcgggcgtgcgcctggaggacgagggccggtaccgctgcgagctcatcaacggcatcgaggacgagagcgtggcgctgaccttgagcttggagggtgtggtgtttccgtaccaacccagccggggccggtaccagttcaattactacgaggcgaagcaggcgtgcgaggagcaggacggacgcctggccacctactcccagctctaccaggcttggaccgagggtctggactggtgtaacgcgggctggctgctcgagggctccgtgcgctaccctgtgctcaccgcacgcgccccgtgcggcggccgaggccggcccgggatccgcagctacggaccccgcgaccggatgcgcgaccgctacgacgccttctgcttcacctccgcgctggcgggccaagtgttcttcgtgcccgggcggctgacgctgtctgaagcccacgcggcgtgccggcgacgcggcgccgtggtggccaaggttgggcacctctacgccgcctggaagttttcggggctagaccagtgcgacggcggctggctggctgacggcagtgtgcgcttcccaatcaccacgccgaggccgcgctgcggggggctcccggatcccggagtgcgcagtttcggcttccccaggccccaacaggcagcctatgggacctactgctacgccgagaattaggcgcccaccgtgtcccctccagcgcgcgcgaagaagcttgggagtcgtggcgggggtctctcgccacccctttccggagagcctcccctccctccagacccggagcggcctctccagacctgccttcccagccnggggctgcgggcctcggaccccggctggcccggcggcggggaggggaggcgggggcgcctccggcggcgagatgcagaggtgaccctcggacccgctgccgttcgcgaaccctagcagaggactcagccaccgccgaggggagggtgaggcggccgggggcattaactgacctctgagtacagcaataaaataacctgggcatctttaaaaaaaaaaaa

SEQ ID NO: 154 - DNA, 877 bp, Homo sapiens
  CDS (44)..(550)
acaactggcctgaccttcaaaggccttcacagctcctgccttcatgttaccgtctactatgttcctcgtgcaccttccactcagcacaaacaggctgcactgcctccgaaacacatcacttgaatcctacctctgctcctttgtccatctgaatcaccctctccacatttctgaccgtgtaatcctgatctcacttcatgaggcagttcgcttctcttttgcatttagctttccccggggtacactgtcaatagcctactgtctgatgtcatcagtcagcacttcatcagaggcaattatgtccacagagcttttggctaattactgtcactcctctttacatgtgtgcatatgcatatcatctttccctaatgagactggaaatcatgattcattccctggagcagtggtttccataagtgaccaacccacagaccagtgcaaactggctgcaaaagagcttcctctgaggaacttattagaatgcagattctttgactgcatgggagaggaggatctcataaatctgggtgtaataggcacagaacgttaggtgtaatatgggcgggactctggactcagcatatccaacaagctgctggctgattccgacgatgccgatgaattgccaggttgggaactgctgcccccagagaacctagcagagagctctgtacgtggtaggtgctcactcccctattgtttgggtgtatgcctcctgataatgaacttgatcgtaactttattgttgtattatgcctgtattgtttccttaagtgaaggaagaatgcttttgagtacctaataggtggcaagctctgtgcctacttacatacatgaactattccttttaataacctttggaaataaagtggca

SEQ ID NO: 155 - DNA, 2893 bp, Homo sapiens
  CDS (233)..(2530)
ttcgtggctctctgtgtaactggtttttacttggttacatgccaccaggaactgctgattattttaaagtcctactaccctgcagctcactactttaccttgatttggaagatcatggaatatctatttgaatcctggatgtatttttctcacagtcttcttgcttcctgaaatttcctctggtgttgagggaaagctgagagaatgaaggctctaaatccccagtggaagcatgatatggcgaagcagagctggtgctgaattgttctctctgatggctctatgggagtggatagcactgagtcttcattgctgggttttagcggttgctgctgtttcggatcagcatgccacaagccccttcgactggctcctctctgataagggacccttccatcgctcacaggaatacacagattttgtggacagaagccggcagggatttagcacaagatacaagatatacagggagtttggccgctggaaagtaaataaccttgcagttgagagaagaaatttccttggctctcctctgcctcttgcccctgaattcttccgcaacataagacttttgggacgtcgacctacccttcagcaaatcacagaaaaccttatcaagaaatatgggacacatttcttgctatctgctactctgggaggagaggagtcactcacaatttttgtggacaagcggaagttgagcaaacgagctgaaggaagtgattccaccaccaatagctcttcggtcactctggagacgctacatcagctagccgcttcttatttcattgacagggacagcacccttcggagacttcaccacattcaaattgcatccactgccataaaggtaacagaaacacggactggtcctcttggctgcagtaactatgacaacctagattctgtcagttctgttctggttcagagtcctgagaataagattcagttgcaagggcttcaagtacttctcccagactatcttcaggaacgttttgtacaagcagctttgagctacattgcttgcaattcagagggagagtttatctgcaaggaaaatgactgctggtgtcactgtggtcccaaatttccagaatgcaactgcccctccatggacattcaagccatggaagagaatcttcttcgaataactgaaacctggaaagcttacaacagtgactttgaggaatcagatgaattcaagttatttatgaaaaggctacctatgaattatttcctcaacacatctactataatgcatttgtggacaatggattctaattttcagcgccgttatgaacaactggagaacagcatgaaacaacttttcctaaaggcgcagaaaattgtacacaagctttttagccttagcaagaggtgtcataaacaacccctcatcagcctgccaagacaaagaacctcaacctactggcttactcgcatccagtcttttctctactgcaatgagaacggcctcctaggcagcttttcagaagagacgcactcgtgcacgtgtccgaatgaccaggtggtctgcaccgcgttcctgccctgcacagtgggagacgcctctgcctgcctgacatgcgcaccagacaaccgcacccgctgcggcacctgcaacaccggctacatgctcagccaggggctctgcaagcctgaagtcgccgagtccaccgatcactatattggctttgaaactgacctgcaagatctcgagatgaaatatctgctgcagaaaacggacagacgaatagaagtccatgccatttttatcagcaatgacatgcgcctcaatagctggtttgatccctcctggcgtaagcggatgctcctcaccttgaagagcaataagtacaagtcaagtctggtccatatgattttgggtctctctttacagatttgcttaactaaaaacagcaccttggagccagtgttggctgtttatgtcaatcccttcggaggcagccactctgagagctggtttatgcctgtgaatgaaaacagctttccagactgggagcggactaagttggacctacccctgcagtgttataactggacattaactctggggaacaaatggaagacattttttgagacagtacacatctacctgagaagtcgcatcaagtccaatggtcccaatggtaatgagagcatttactatgaacctctggagtttattgacccttcccggaacctgggctatatgaaaatcaataacattcaagtgtttggctacagcatgcactttgaccctgaagcaattcgggacctgattttgcagctggactacccctatactcagggatcccaggattcagcacttttgcaactactagagatcagagaccgtgtaaataaactctccccacctggtcagcgtcgtctagatcttttctcttgcttgcttcgtcatagactcaagctgtctactagtgaggtggtgaggatccaatctgctctgcaggcgtttaatgccaaattgccaaacacaatggattatgacacgaccaaattatgtagttaaccataaatgtcaagcacaacccaaaatcttgaaggagtttttacagtgcttttgtggaacagtttatgtttggaagagtaaatttaaattgtcttttcaatatctgtcttatatcagtcaataacattggatggcaatttacacacatgaacttgctgacaatgaatatattatacagcagttttggtttatgaatgacataaatactgacaccagtctagaagacattctactttttacaataaatttcatttgtaattttatatgttccgtggcaatgcttttgtgcattacatcctctagagggaacataaaaagataccaataaaattttgtagctgaacagttattaaaaaaaaa

SEQ ID NO: 156 - DNA, 591 bp, Homo sapiens
  CDS (163)..(369)
  misc_feature (1)...(591): n = a,t,c or g
gccccccccccgggggnaattgannatcgatgactttagtcagngcggnggaattcgggccaacacacgcccctgcccctcgtaggcacctgcctgccccacacggactcccgggccacgccccagcccgacaatgtcgagtatattattattaatattattatgaatttttgtaagaaaccgaggcgatgccacgctttgctgctaccgccctgggctggactggaggtgggcatgccaccctcacacacacagctgggcatgcacccagggcctcccccccccccatctggaagtgaaggcccagggactcctccaacagacaacggacggacggatgccgctggtgctcaggaagagctagtgccttaggtgggggaaggcaggactcacgactgagagagagaggagggggatatgaccaccctgccccatctgcaggagcctgaagatccagctcaagtgccatcctgccagtggcccccagactgtggggttgggacgcctggcctctgtgtcctagaagggaccctcctgtggtctttgtcttgatttttcttaataaacggtgctatccccgccaaaaaaaaa

SEQ ID NO: 157 - DNA, 1861 bp, Homo sapiens
  CDS (485)..(1858)
gagcacgagagtcaatccttgtttggttaacaaattccccgcaaaatatccccccgaaacccccaggagctgtagtgatgtcatatccgttgtccaggtctccacacctctctcagcagttaatccctttatctattccttgggtcaaaacttttgaggtgggctagctatatagcagcgggggagagggtaaactggggcgcgcgggttggaggcgcttcagcaccgcggccagcgcccactgcagcccaacccactctctagagctcccggactcctagctctgagaatgcctgcggaatgatcgccccccagggcggctgccgccgctgccgctgctgctgttattgctactgctgctgccgccgcctctgcttccactcggctctgactggcaggcagaaagtgcacgagggaaaggtctctgcagtgagtggagagcctacataaaagagagtaaagaggggcaaaaacccagatcagaatgcaggcgacgtccaaccttctcaacctcctgctgctgtctttgtttgccggattagatccttccaagactcagattagtcctaaagaagggtggcaggtgtacagctcagctcaggatcctgatgggcggtgcatttgcacagttgttgctccagaacaaaacctgtgttcccgggatgccaaaagcaggcaacttcgccaactactggaaaaggttcagaacatgtcccagtctattgaagtcttaaacttgagaactcagagagatttccaatatgttttaaaaatggaaacccaaatgaaagggctgaaggcaaaatttcggcagattgaagatgatcgaaagacacttatgaccaagcattttcaggagttgaaagagaaaatggacgagctcctgcctttgatccccgtgctggaacagtacaaaacagatgctaagttaatcacccagttcaaggaggaaataaggaatctgtctgctgtcctcactggtattcaggaggaaattggtgcctatgactacgaggaactacaccaaagagtgctgagcttggaaacaagacttcgtgactgcatgaaaaagctaacatgtggcaaactgatgaaaatcacaggcccagttacagtcaagacatctggaacccgatttggtgcttggatgacagaccctttagcatctgagaaaaacaacagagtctggtacatggacagttatactaacaataaaattgttcgtgaatacaaatcaattgcagactttgtcagtggggctgaatcaaggacatacaaccttcctttcaagtgggcaggaactaaccatgttgtctacaatggctcactctattttaacaagtatcagagtaatatcatcatcaaatacagctttgatatggggagagtgcttgcccaacgaagcctggagtatgctggttttcataatgtttacccctacacatggggtggattctctgacatcgacctaatggctgatgaaatcgggctgtgggctgtgtatgcaactaaccagaatgcaggcaatattgtcatcagccaacttaaccaagataccttggaggtgatgaagagctggagcactggctaccccaagagaagtgcaggggaatctttcatgatctgtgggacactgtatgtcaccaactcccacttaactggagccaaggtgtattattcctattccaccaaaacctccacatatgagtacacagacattcccttccataaccaatactttcacatatccatgcttgactacaatgcaagagatcgagctctctatgcctggaacaatggccaccaggtgctgttcaatgtcacccttttccatatcatcaagacagaggatgacacatag

SEQ ID NO: 158 - DNA, 1487 bp, Homo sapiens
  CDS (21)..(1484)
aactcattagctccacagcaatgagtcctccactgctgaagcttggcgctgtgcttagtaccatggcaatgatctcaaactggatgtcccaaactctcccatccttggtgggactgaacaccacgaggctgtccaacctcctgctgctgtctttgtttgccggattagatccttccaagactcagattagtcctaaagaagggtggcaggtgtacagctcagctcaggatcctgatgggcggtgcatttgcacagttgttgctccagaacaaaacctgtgttcccgggatgccaaaagcaggcaacttcgccaactactggaaaaggttcagaacatgtcccagtctattgaagtcttaaacttgagaactcagagagatttccaatatgttttaaaaatggaaacccaaatgaaagggctgaaggcaaaatttcggcagattgaagatgatcgaaagacacttatgaccaagcattttcaggagttgaaagagaaaatggacgagctcctgcctttgatccccgtgctggaacagtacaaaacagatgctaagttaatcacccagttcaaggaggaaataaggaatctgtctgctgtcctcactggtattcaggaggaaattggtgcctatgactacgaggaactacaccaaagagtgctgagcttggaaacaagacttcgtgactgcatgaaaaagctaacatgtggcaaactgatgaaaatcacaggcccagttacagtcaagacatctggaacccgatttggtgcttggatgacagaccctttagcatctgagaaaaacaacagagtctggtacatggacagttatactaacaataaaattgttcgtgaatacaaatcaattgcagactttgtcagtggggctgaatcaaggacatacaaccttcctttcaagtgggcaggaactaaccatgttgtctacaatggctcactctattttaacaagtatcagagtaatatcatcatcaaatacagctttgatatggggagagtgcttgcccaacgaagcctggagtatgctggttttcataatgtttacccctacacatggggtggattctctgacatcgacctaatggctgatgaaatcgggctgtgggctgtgtatgcaactaaccagaatgcaggcaatattgtcatcagccaacttaaccaagataccttggaggtgatgaagagctggagcactggctaccccaagagaagtgcaggggaatctttcatgatctgtgggacactgtatgtcaccaactcccacttaactggagccaaggtgtattattcctattccaccaaaacctccacatatgagtacacagacattcccttccataaccaatactttcacatatccatgcttgactacaatgcaagagatcgagctctctatgcctggaacaatggccaccaggtgctgttcaatgtcacccttttccatatcatcaagacagaggatgacacatag

SEQ ID NO: 159 - DNA, 1290 bp, Homo sapiens
  CDS (253)..(1071)
gggctgggtggcacggctggcgagcccggaactcctctggtcacagctcagcgtccgcggagccgggcggcgctgcagctgcacttggctcgtctgtgggtctgacagtcccagctctgcgcggggaacagcggcccggcgctgggtgtgggaggaccaggctgccccaagagcgcggagactcacgcccgctcctctcctgttgcgaccgggagccgggtaggaggcaggcgcgctccctgcggccccgggatgacttctcagcgttcccctctggcgcctttgctgctcctctctctgcacggtgttgcagcatccctggaagtgtcagagagccctgggagtatccaggtggcccggggtcagccagcagtcctgccctgcactttcactaccagcgctgccctcattaacctcaatgtcatttggatggtcactcctctctccaatgccaaccaacctgaacaggtcatcctgtatcagggtggacagatgtttgatggtgccccccggttccacggtagggtaggatttacaggcaccatgccagctaccaatgtctctatcttcattaataacactcagttatcagacactggcacctaccagtgcctggtcaacaaccttccagacatagggggcaggaacattggggtcaccggtctcacagtgttagttcccccttttgccccacactgccaaatccaaggatcccaggatattggcagcgatgtcatcctgctctgtagctcagaggaaggcattcctcgaccaacttacctttgggagaagttagacaataccctcaaactacctccaacagctactcaggaccaggtccagggaacagtcaccatccggaacatcagtgccctgtcttcaggtttgtaccagtgcgtggcttctaatgctattggaaccagcacctgtcttctggatctccaggttatttcacgggcattcttttactggagaagcaaaaataaagaggaggaagaagaagaaattcctaatgaaataagctttattcactggatcatgaaggagggaaaggtccagcatgtgcccaactaggaggatacaaatgaagagttctccttatcttccgtgtctccaggagaggatgatcttccacccaagtgttcttctgccaaagcatttcacactgagatttcctcctcggacaacaacacactaacctcttccaatgcctacaacagtcgatactggagcaacaatccaaaagttcatagaaacacagagtcagtcagccacttcaaaaaaaaaaaa

SEQ ID NO: 160 - DNA, 1880 bp, Homo sapiens
  CDS (80)..(1867)
ggaattctcgggtcgacgatttcgtggtgcccgcgaacttccccggcagcggactgtagcccaggcagacgccgtcgagatgcagggcccaccgctcctgaccgccgcccacctcctctgcgtgtgcaccgccgcgctggccgtggctcccgggcctcggtttctggtgacagccccagggatcatcaggcccggaggaaatgtgactattggggtggagcttctggaacactgcccttcacaggtgactgtgaaggcggagctgctcaagacagcatcaaacctcactgtctctgtcctggaagcagaaggagtctttgaaaaaagctcttttaagacacttactcttccatcactacctctgaacagtgcagatgagatttatgagctacgtgtaaccggacgtacccaggatgagattttattctctaatagtacccgcttatcatttgagaccaagagaatatctgtcttcattcaaacagacaaggccttatacaagcaaaagcaagaagtgaagtttcgcattgttacactcttctcagattttaagccttacaaaacctctttaaacattctcattaaggaccccaaatcaaatttgatccaacagtggttgtcacaacaaagtgatcttggagtcatttccaaaacttttcagctatcttcccatccaatacttggtgactggtctattcaagttcaagtgaatgaccagacatattatcaatcatttcaggtttcagaatatgtattaccaaaatttgaagtgactttgcagacaccattatattgttctatgaattctaagcatttaaatggtaccatcacggcaaagtatacatatgggaagccagtgaaaggagacgtaacgcttacatttttacctttatccttttggggaaagaagaaaaatattacaaaaacatttaagataaatggatctgcaaacttctcttttaatgatgaagagatgaaaaatgtaatggattcttcaaatggactttctgaatacctggatctatcttcccctggaccagtagaaattttaaccacagtgacagaatcagttacaggtatttcaagaaatgtaagcactaatgtgttcttcaagcaacatgattacatcattgagttttttgattatactactgtcttgaagccatctctcaacttcacagccactgtgaaggtaactcgtgctgatggcaaccaactgactcttgaagaaagaagaaataatgtagtcataacagtgacacagagaaactatactgagtactggagcggatctaacagtggaaatcagaaaatggaagctgttcagaaaataaattatactgtcccccaaagtggaacttttaagattgaattcccaatcctggaggattccagtgagctacagttgaaggcctatttccttggtagtaaaagtagcatggcagttcatagtctgtttaagtctcctagtaagacatacatccaactaaaaacaagagatgaaaatataaaggtagtatccaggggacagttggtggctgtaggaaaacaaaattcaacaatgttctctttaacaccagaaaattcttggactccaaaagcctgtgtaattgtgtattatattgaagatgatggggaaattataagtgatgttctaaaaattcctgttcagcttgtttttaaaaataagataaagctatattggagtaaagtgaaagctgaaccatctgagaaagtctctcttaggatctctgtgacacagcctgactccatagttgggattgtagctgttgacaaaagtgtgaatctgatgaatgcctctaatgatattacaatggaaaatgtgagtttagctattttttcattatgaaaatatgtat

SEQ ID NO: 161 - DNA, 2743 bp, Homo sapiens
  CDS (725)..(2608)
tgtatttattgaattcaatatttaaaacaaacagaaacataaggggcaaggggcagggagaggaaagcctggtgcctagaaacatgaaataacgtaagatgtaaaacattgattcatatacaaatggtaaattccaagtgctctgctactaactagggggcaccttaaacattgttcggcaagatgaatctcatagtgtgataacttaatgctttaagtttaaatatatttcataagttttaccaatctgatgtgttattttctatagatttccagcacctatctagagagcaattggcctatacgggtgagttgttattttgttggtgttaacttttgttgactagcatttgctgcaagaggcattctgggaagagcccttcagtgggtgtactgagaaaaataaaactcttgatctattgtaacattgctagtatattaacatctataattttgtcagatataactgaatatttggactttaaaatatttaattagcaaacatttattaattgtctgtttgcctgacacaatactaagctctttatgcctaataaagtatataggtttgcaaggaaaagttcttatttttttttttaaacagttttcagctattgataagcttggacagaatattgctgtggttggcaagtttggttttgcacattactctttactcaccaaaaaatggaaactttttggaaacattacccaggagcaaaatatgatcgtgacaggtggcttagcctggtggaatgattttatggtccttgcgtgttataacataaatgaccgtcaagaagagcttagagtatacttgcgaacatcaaatctggacaatgcctttgctcatgtcaccaaagcacaagcagaaacattactgcttagtgtcttccaggacatggtaatagtatttagagcagactgttcaatatgcctttacagtattgaaagaaaatctgatggtccaaatactactgctggtattcaagttcttcaggaggtttccatgtcacgctacattcctcaccctttcctggtggtatctgtcactctgacatcagtgagtacagagaatggaatcaccttgaaaatgccacagcaggctcgtggtgcagagagcattatgttaaacctggcaggacagctcatcatgatgcagagggacaggtcaggcccacagatccgggagaaggacagtaaccctaataaccaaaggaaacttctgccattctgtcctcctgttgtactagcccagtctgttgaaaatgtctggacaacgtgtcgagcaaataaacagaaacgtcaccttctggaggccctctggctgagctgtggtggtgcagggatgaaagtttggctccctctcttccctagggatcaccgcaagccccattccttcttgtcccagcggatcatgctgcctttccacatcaacatttacccgctagctgttctgtttgaagatgctttagtccttggtgctgtcaatgacactttgctctatgattctttatatactcggaacaatgctagagaacagctggaggtgctcttccctttctgtgttgtggagagaacctctcagatctacctccaccacattctacgtcaacttctggtcagaaaccttggggagcaagccttgctcttggcccagtcctgtgccacattaccttacttccctcatgtgctggagctcatgctccatgaagtactggaagaagaagctacctcacgggagcccattcccgaccctctgcttcccactgtggcaaaatttatcactgagttccccctcttcctgcagacagttgtccattgtgccaggaagaccgaatatgccctgtggaattacctttttgcagctgttggaaaccctaaggacttgtttgaggagtgtttgatggctcaggatttggacacagctgcctcttaccttattatcttacagaatatggaagtccctgcagtaagtaggcaacatgctacccttctatttaacacagcactagaacaaggcaagtgggacctttgtcgacacatgattcgatttcttaaagccattggctctggagaatctgagacacctccatccacacccacagctcaggaacccagttcaagtggtggatttgagttcttcaggaatcgaagcatcagtttatcccagtcagctgaaaatgttcctgccagtaaattcagtttacagaaaacactaagtatgccatctggtccctctggaaaaagatggagcaaagacagtgactgtgctgagaacatgtatattgacatgatgctctggagacatgctcggcgcctcttagaagatgtgaggttaaaggaccttggctgctttgcagcccagctgggctttgaactaattagttggctatgcaaggaacgtacccgagccgcccgggtagacaactttgtaatagccctgaagagactccacaaagatttcctgtggccacttccaatcatcccagcctcttctatcagttctcctttcaaaaatggaaaataccgaactggtaatgtagacttcatgtcacttgtacaaggagaattgtattttactccgtgtatttacacattttgctattagttgatattcaaggaattattttcattccaaacttaggaatggataaaagccaactttttgtacatgagttggaatgcccactgtttgaccaaagatgtaaataaagtagaacctatgtctctaaaaaaaaaa

SEQ ID NO: 162 - DNA, 1151 bp, Homo sapiens
  CDS (98)..(892)
attggctgccggcgtgactttgaccgcttcccggtgcgttaccggcagctgaacccacccggcgccacgggactttgacgcgtgctctgcgcttgccatgagactcctgggagccgcagccgtcgcggctctggggcgcggaagggcccccgcctccctaggctggcagaggaagcaggttaattggaaggcctgccgatggtcttcatcaggggtgattcctaatgaaaaaatacgaaatattggaatctcagctcacattgattctgggaaaactacattaacagaacgagtcctttactacactggcagaattgcaaagatgcatgaggtgaaaggtaaagatggagttggtgctgtcatggattccatggaactagagagacaaagaggaatcactattcagtcagcagccacttacaccatgtggaaagatgtcaatattaacattatagatactcctgggcatgtggacttcacaatagaagtggaaagggccctgagagtgttggatggtgcagtccttgttctctgtgctgttggaggggtacagtgccagaccatgactgtcaatcgtcagatgaagcgctacaacgttccgtttctaacttttattaacaaattggaccgaatgggctccaacccagccagggccctgcagcaaatgaggtctaaactaaatcataatgcagcgtttatgcagatacccatgggtttggagggtaattttaaaggtattgtagatcttattgaggaacgagccatctattttgatggagactttggtcagattgttcgatatggtgagattccagctgaattaagggcggcggccactgaccaccggcaggagctaattgaatgtgttgccaattcagatgaacagcttgggtgagatgtttctggaagaaaaaatcccctcgatttctgatttaaagctagcaattcgaagagctactctgaaaagatcatttactcctgtatttttgggaagcgccttgaagaacaaaggagttcagcctcttttagatgctgttttagaatacctcccaaatccatctgaagtccagaactatgctattctcaataaagaggatgactcaaaagagaaaaccaaaatcctaatgaactccagtagagacaattcccac

SEQ ID NO: 163 - DNA, 1213 bp, Homo sapiens
  CDS (202)..(1047)
aggggaagtaggaggagagtcaggactcccaggacagagagtgcacaaactacccagcacagccccctccgccccctctggaggctgaagagggattccagcccctgccacccacagacacgggctgactggggtgtctgccccccttggggggggggcagcacagggcctcaggcctgggtgccacctggcacctagaagatgcctgtgccctggttcttgctgtccttggcactgggccgaagcccagtggtcctttctctggagaggcttgtggggcctcaggacgctacccactgctctccgggcctctcctgccgcctctgggacagtgacatactctgcctgcctggggacatcgtgcctgctccgggccccgtgctggcgcctacgcacctgcagacagagctggtgctgaggtgccagaaggagaccgactgtgacctctgtctgcgtgtggctgtccacttggccgtgcatgggcactgggaagagcctgaagatgaggaaaagtttggaggagcagctgacttaggggtggaggagcctaggaatgcctctctccaggcccaagtcgtgctctccttccaggcctaccctactgcccgctgcgtcctgctggaggtgcaagtgcctgctgcccttgtgcagtttggtcagtctgtgggctctgtggtatatgactgcttcgaggctgccctagggagtgaggtacgaatctggtcctatactcagcccaggtacgagaaggaactcaaccacacacagcagctgcctgactgcagggggctcgaagtctggaacagcatcccgagctgctgggccctgccctggctcaacgtgtcagcagatggtgacaacgtgcatctggttctgaatgtctctgaggagcagcacttcggcctctccctgtactggaatcaggtccagggccccccaaaaccccggtggcacaaaaacctggtgaggcctcccccttcccaagtccattcccactgtaggccgatgcctgtgcaaaggacgcagtgccatatcagagaggatccttgaagaggactcaccccaagcaagggaaaattggtgggggaacttctgccttcctggtttccttgactttggcctcctcctcttcctccttatcttctccaacctccttcctttatttgttccacagactggaccgcagatcattaccttgaaccacacagacctg

SEQ ID NO: 164 - DNA, 1098 bp, Homo sapiens
  CDS (55)..(717)
ggacctgggacaccagcaccctccccaccccagccagtgctttcctcctggcccatggggacgctggtggccaagctgctcctgcccaccctcagcagcctggccttcctccccactgtcagcatcgcggccaagaggcggttccacatggaggccatggtctacctcttcaccctgttcttcgtggcgctccaccatgcctgcaatggacccggcttgtctgtgctgtgcttcatgcgtcacgacatcctggagtatttcagtgtctacgggacagccctgagcatgtgggtctcgctgatggcactggccgacttcgacgaacccaagaggtcaacatttgtgatgttcggcgtcctgaccattgctgtgcggatctaccatgaccgatggggctacggggtgtactcgggccccatcggcacagccatcctcatcatcgcggcaaagtggctacagaagatgaaggagaagaagggcctgtacccagacaagagcgtctacacccagcagataggccccggcctctgcttcggggcgctggccctgatgctacgcttcttctttgaggactgggactacacttacgtccacagcttctaccactgtgccctggctatgtcctttgttctgctgctgcccaaggtcaacaagaaggctggatccccggggaccccggccaagctggactgctccaccctgtgctgtgcttgtgtctgatgctgcgcccagcccggctctgagcccctgccctccccagctcacacttggccagagtcccagacagtttctcctcctgcagctcctgctgtccttccctgccctggagcatccaggagaaacatctcttccacaccctgagaggttcccgggggtctgtgaagggcccaccatgctgcactaaatgcttcttaagaaactgcttattcccttgtgacggggtgcgcaggaccaagctggaaagataagaatgttctcctcccaggccttgtcacaacccactggcgtgtctggtggagccataggtctggcgtctgcccaccccactgctggccaggagcccaggagtcccagccgggtgccagccatgacaggggg

SEQ ID NO: 165 - DNA, 1741 bp, Homo sapiens
  CDS (109)..(1680)
atctgcctccagcactgcccatccttgcccctttccactgtccttggagcttcctgggcccttccctgggcctcaggatcccaccctccatcccgtctgccctgcaggatgccgcagctgagcctgtcctggctgggcctcgggcccgtggcagcatccccgtggctgcttctgctgctggttgggggctcctggctcctggcccgcgtcctggcctggacctacaccttctatgacaactgccgccgtctccagtgttttcctcaacccccgaaacagaactggttttggggacaccagggcctggtcactcccacggaagagggcatgaagacattgacccagctggtgaccacatatccccagggctttaagttgtggctgggtcctaccttccccctcctcattttatgccaccctgacatcatccggcctatcaccagtgcctcagctgctgtcgcacccaaggatatgattttctatggcttcctgaagccctggctgggggatgggctcctgctgagtggtggtgacaagtggagccgccaccgtcggatgttgacgcctgccttccatttcaacatcttgaagccttatatgaagattttcaacaagagtgtgaacatcatgcacgacaagtggcagcgcctggcctcagagggcagcgccagactggacatgtttgaacacatcagcctcatgaccttggacagtctgcagaaatgtgtcttcagctttgaaagcaattgtcaggagaagcccagtgaatatattgccgccatcttggagctcagtgcctttgtagaaaagagaaaccagcagattctcttgcacacggacttcctgtattatctcactcctgatgggcagcgcttccgcagggcctgccacctggtgcacgacttcacagatgccgtcatccaggagcggcgctgcaccctccccactcagggtattgatgatttcctcaagaacaaggcaaagtccaagactttagacttcattgatgtgcttctgctgagcaaggatgaagatgggaaggaattgtctgatgaggacataagagcagaagctgacaccttcatgtttgagggccatgacactacagccagtggtctctcctgggtcctataccaccttgcaaagcacccagaataccaggaacagtgccggcaagaagtgcaagagcttctgaaggaccgtgaacctatagagattgaatgggacgacctggcccagctgcccttcctgaccatgtgcattaaggagagcctgcggttgcatcccccagtcccggtcatctcccgatgttgcacgcaggactttgtgctcccagacggccgcgtcatccccaaaggcattgtctgcctcatcaatattatcgggatccattacaacccaactgtgtggccagaccctgaggtctacgaccccttccgtttcaaccaagagaacatcaaggagaggtcacctctggcttttattcccttctcggcagggcccagaaactgcatcgggcaggcgttcgccatggctgagatgaaggtggtcctggcgctcacgctgctgcacttccgcatcctgccgacccacactgaaccccgcaggaaacccgagctgatattgcgcgcagagggtggactttggctgcgggtggagcccctgggtgcgaactcacagtgactgccctacccacccacccacctctgtagagtcccagaaacaaaactatgctgacaaa

SEQ ID NO: 166 - DNA, 951 bp, Homo sapiens
  CDS (18)..(881)
agtctgtcatctgaaccatgaggatctggtggcttctgcttgccattgaaatctgcacagggaacataaactcacaggacacctgcaggcaagggcaccctggcatccctgggaaccccggtcacaatggtctgcctggaagagatggacgagacggagcgaagggtgacaaaggcgatgcaggagaaccaggacgtcctggcagcccggggaaggatgggacgagtggagagaagggagaacgaggagcagatggaaaagttgaagcaaaaggcatcaaaggtgatcaaggctcaagaggatccccaggaaaacatggccccaaggggcttgcagggcccatgggagagaagggcctccgaggagagactgggcctcaggggcagaaggggaataagggtgacgtgggtcccactggtcctgaggggccaaggggcaacattgggcctttgggcccaactggtttaccgggccccatgggccctattggaaagcctggtcccaaaggagaagctggacccacggggccccaggatatgcccattaaatttgataagatcctgtataacgaattcaaccattatgatacagcagcggggaaattcacgtgccacattgctggggtctattacttcacctaccacatcactgttttctccaggaatgttcaggtgtctttggtcaaaaatggagtaaaaatactgcacaccaaagatgcttacatgagctctgaggaccaggcctctggcggcattgtcctgcagctgaagctcggggatgaggtgtggctgcaggtgacaggaggagagaggttcaatggcttgtttgctgatgaggacgatgacacaactttcacagggttccttctgttcagcagcccgtgacagaggagagtttaaaaatccgccacaccatccatcagaatcagcttgggatgaacttattcagatg

SEQ ID NO: 167 - DNA, 1176 bp, Homo sapiens
  CDS (18)..(917)
  misc_feature (1)...(1176): n = a,t,c or g
agtctgtcatctgaaccatgaggatctggtggcttctgcttgccattgaaatctgcacagggaacataaactcacaggacacctgcaggcaagggcaccctggcatccctgggaaccccggtcacaatggtctgcctggaagagatggacgagacggagcgaagggtgacaaaggcgatgcaggagaaccaggacgtcctggcagcccggggaaggatgggacgagtggagagaagggagaacgaggagcagatggaaaagttgaagcaaaaggcatcaaaggtgatcaaggctcaagaggatccccaggaaaacatggccccaaggggcttgcagggcccatgggagagaagggcctccgaggagagactgggcctcaggggcagaaggggaataagggtgacgtgggtcccactggtcctgaggggccaaggggcaacattgggcctttgggcccaactggtttaccgggccccatgggccctattggaaagcctggtcccaagggagaagctggacccacggggccccagggtgagccaggagtccggggaataagaggctggaaaggagatcgaggagagaaagggaaaatcggtgagactctagtcttgccaaaaagtgctttcactgtggggctcacggtgctgagcaagtttccttcttcagatgtgcccattaaatttgataagatccacatcactgttttctccaggaatgttcaggtgtctttggtcaaaaacggagtaaaaatactgcacaccagagatgcttacgtgagctctgaggaccaggcctctggcagcattgtcctgcagctgaagctcggggatgagatgtggtgtgtgattcatcgtgtggcaaaatgtctctccatctgtgatccttttacagtggcgtcttgtgtgcgctctcgatgagggcaaggtcacctctgctttgaggggccgggtttagtggtctcctacccagagtgtcgggtccgggaactgcttctgcatgagccccttgctccacgtgaatctgaatagttcgttctggcagtggcggtgaattcgtcctgccaggacccgccctctgcatacactcaggcgcacccctgctaaagccctttaacttcagcgctacaagtccttgcttaanaagcctatcccttgngcgntcacaggccggatt

SEQ ID NO: 168 - DNA, 1026 bp, Homo sapiens
  CDS (25)..(1023)
tcagttcagtctgtcatctgaaccatgaggatctggtggcttctgcttgccattgaaatctgcacagggaacataaactcacaggacacctgcaggcaagggcaccctggcatccctgggaaccccggtcacaatggtctgcctggaagagatggacgagacggagcgaagggtgacaaaggcgatgcaggagaaccaggacgtcctggcagcccggggaaggatgggacgagtggagagaagggagaacgaggagcagatggaaaagttgaagcaaaaggcatcaaaggtgatcaaggctcaagaggatccccaggaaaacatggccccaaggggcttgcagggcccatgggagagaagggcctccgaggagagactgggcctcaggggcagaaggggaataagggtgacgtgggtcccactggtcctgaggggccaaggggcaacattgggcctttgggcccaactggtttaccgggccccatgggccctattggaaagcctggtcccaaaggagaagctggacccacggggccccagggtgagccaggagtccagggaataagaggctggaaaggagatcgaggagagaaagggaaaatcggtgagactctagtcttgccaaaaagtgctttcactgtggggctcacggtgctgagcaagtttccttcttcagataggcccattaaatttgataagatcctgtataacgaattcaaccattatgatacagcagcggggaaattcacgtgccacattgctggggtctattacttcacctaccacatcactgttttctccagaaatgttcaggtgtctttggtcaaaaatggagtaaaaatactgcacaccaaagatgcttacatgagctctgaggaccaggcctctggcggcattgtcctgcagctgaagctcggggatgaggtgtggctgcaggtgacaggaggagagaggttcaatggcttgtttgctgatgaggacgatgacacaactttcacagggttccttctgttcagcagcccgtga

SEQ ID NO: 169 - DNA, 945 bp, Homo sapiens
  CDS (25)..(942)
tcagttcagtctgtcatctgaaccatgaggatctggtggcttctgcttgccattgaaatctgcacagggaacataaactcacaggacacctgcaggcaagggcaccctggcatccctgggaaccccggtcacaatggtctgcctggaagagatggacgagacggagcgaagggtgacaaaggcgatgcaggagaaccaggacgtcctggcagcccggggaaggatgggacgagtggagagaagggagaacgaggagcagatggaaaagttgaagcaaaaggcatcaaaggtgatcaaggctcaagaggatccccaggaaaacatggccccaaggggcttgcagggcccatgggagagaagggcctccgaggagagactgggcctcaggggcagaaggggaataagggtgacgtgggtcccactggtcctgaggggccaaggggcaacattgggcctttgggcccaactggtttaccgggccccatgggccctattggaaagcctggtcccaaaggagaagctggacccacggggccccagggtgagccaggagtccagggaataagaggctggaaaggagatcgaggagagaaagggaaaatcggtgagactctagtcttgccaaaaagtgctttcactgtggggctcacggtgctgagcaagtttccttcttcagataggcccattaaatttgataagatccacatcactgttttctccagaaatgttcaggtgtctttggtcaaaaatggagtaaaaatactgcacaccaaagatgcttacatgagctctgaggaccaggcctctggcggcattgtcctgcagctgaagctcggggatgaggtgtggctgcaggtgacaggaggagagaggttcaatggcttgtttgctgatgaggacgatgacacaactttcacagggttccttctgttcagcagcccgtga

SEQ ID NO: 170 - DNA, 1661 bp, Homo sapiens
  CDS (9)..(1202)
gcatttctatgatgtggctgcttttaacaacaacttgtttgatctgtggaactttaaatgctggtggattccttgatttggaaaatgaagtgaatcctgaggtgtggatgaatactagtgaaatcatcatctacaatggctaccccagtgaagagtatgaagtcaccactgaagatgggtatatactccttgtcaacagaattccttatgggcgaacacatgctaggagcacaggtccccggccagttgtgtatatgcagcatgccctgtttgcagacaatgcctactggcttgagaattatgctaatggaagccttggattccttctagcagatgcaggttatgatgtatggatgggaaacagtcggggaaacacttggtcaagaagacacaaaacactctcagagacagatgagaaattctgggcctttagttttgatgaaatggccaaatatgatctcccaggagtaatagacttcattgtaaataaaactggtcaggagaaattgtatttcattggacattcacttggcactacaatagggtttgtagccttttccaccatgcctgaactggcacaaagaatcaaaatgaattttgccttgggtcctacgatctcattcaaatatcccacgggcatttttaccaggttttttctacttccaaattccataatcaaggctgtttttggtaccaaaggtttctttttagaagataagaaaacgaagatagcttctaccaaaatctgcaacaataagatactctggttgatatgtagcgaatttatgtccttatgggctggatccaacaagaaaaatatgaatcagagtcgaatggatgtgtatatgtcacatgctcccactggttcatcagtacacaacattctgcatataaaacagctttaccactctgatgaattcagagcttatgactggggaaatgacgctgataatatgaaacattacaatcagagtcatccccctatatatgacctgactgccatgaaagtgcctactgctatttgggctggtggacatgatgtcctcgtaacaccccaggatgtggccaggatactccctcaaatcaagagtcttcattactttaagctattgccagattggaaccactttgattttgtctggggcctcgatgcccctcaacggatgtacagtgaaatcatagctttaatgaaggcatattcctaaatgcaatgcatttacttttcaattaaaagttgcttccaagcccataagggactttagaaaaaatagtaaccaacaatgaggttgtcccccagcaccctgggggagatgcacagtggagtctgttttccaagtcaattgtgttagtgttatttatgtttagagacatctttgcatgggaccatctacaggtccttataaacaatgaggtagattaggcaaaaagataaacaagttgctactctatctggcatctaagtctaattaaattgtaatttttagggcataccatgaagtatagaaatgtctgaagcttcaaaggaacagtgaaattcctttaaggtcctatatggaaacctctgttgtcattttatttatatggattgctatggcaatggacagagtgtgggattaggaggagggcctgtaacttctttataaaagctcagaacaacgaca

SEQ ID NO: 171 - DNA, 6044 bp, Homo sapiens
  CDS (49)..(2568)
attagatcttctacggtcttgggttgtcaccgtgattgcacttccaagatgtgtacgttatgtcatgctacattttacgtgttaagagcacagtgcacagtgacctctcccatgactgagagaagtaaaattcacattgtgatcatctttacacctatagcaataaccctgtataaagtcttccttactgttttaacaagtgtcagaataattttttcttcaacaagttctcaacaaaaacccatacccagaatctttttctggaatgaaaagggcttcagggcttctcaggtcacttttgttgtattgcccacagagctgagagtaaacaactcctttggacgttttggagaagaaaggtccttctatacacccacttcatccaaggaattacatgcttgggatattaagcaacagctacaaaaatcaggaagttccttctccatgtatatgacgaagttctggacaggagcccgctgccagaatacgaatactcttccccaaagacccctcctcatgcccctacacgctcttgccggtctagcctttcattgcctgaagcacggcgagaacgcctggagagctcgtccaagcaagtgcaacccgctggtgactgcaaatgagcacatggaactgggccgcgcgcacgggaggacggagaggcggaaaggatggcgctgtgacagccgggccggagccctcgcgtccccaccccgcgccctggccgctgggcccggcgagatggagtccacagcctaccctctcaatttgagcctgaaagaagaggaagaggaagaagagattcagagccgggaactagaggacggcccggcagacatgcagaaagtacgaatctgctctgagggcggatgggtaccggccctatttgatgaggtggccatatatttttccgatgaggaatgggaagttttgacggagcaacaaaaggccctctaccgggaagtcatgaggatgaattatgaaactgtcctgtccctggaattcccattccctaagccagacatgatcacccgtttggaaggggaggaggagtctcagaattctgacgagtggcagctccaaggaggcacctctgcagaaaatgaagaatctgacgtaaagcctccagactggccaaacccaatgaatgctacctcccagtttcctcagcctcagcactttgacagctttggcctccgtctgcctcgggatatcacagagctgcccgagtggagtgaggggtaccccttctacatggccatgggcttcccagggtatgacctctcggctgatgacatagctgggaagtttcagttcagccggggcatgcgccgcagttacgacgcagggttcaagctgatggtagtggaatatgctgagagtaccaacaactgccaggctgccaagcagtttggagtattggaaaaaaacgttcgagactggcgcaaagtgaagccacagcttcaaaacgcccacgccatgcggcgggcattccgaggccccaagaatgggaggtttgctctggtggaccagcgtgtggccgaatatgtcagatacatgcaggccaaaggggaccccatcacccgggaggcgatgcagctgaaagctctcgaaatcgcccaggaaatgaacattccagagaaagggttcaaggcaagcttgggttggtgtcgaagaatgatgagaaggtatgacctgtctctgaggcataaagtgcccgtgccccagcacctgccggaagacctgactgagaaactcgtcacttaccagcgcagtgtcctggctctgcgcagggcgcatgactatgaggtagctcagatggggaatgcagatgagacgcccatttgtttagaggtgccatcacgggtaactgttgataaccagggcgaaaagcctgtcttggtcaagacaccaggcagggaaaaactgaaaatcacagcaatgcttggtgtcttggctgatgggaggaagttaccaccgtacatcattttgaggggaacatatatccccccggggaagtttcccagtgggatggaaattcgctgccaccggtatgggtggatgactgaagacttgatgcaggactggttggaagtggtgtggagacggaggacaggagcagtgcccaagcagcgagggatgctgatcttgaatggcttccggggccatgccacagattccgtgaagaactccatggaaagcatgaacactgacatggtgatcatcccagggggtctgacctcacagcttcaggtgctggatgtcgtggtctacaagccactgaatgacagtgtgcgggcccagtactccaactggcttctggctgggaacctggcgctgagcccaaccgggaatgctaagaagccacccctgggcctctttctggagtgggtcatggtcgcgtggaatagcatctcaagtgagtccatcgtccaagggttcaagaagtgccatatctccagcaacttggaggaggaagacgatgtcctgtgggaaatcgagagtgagttgccaggaggaggagaaccaccaaaagattgtgacaccgaaagcatggctgagagcaactgaagggaaagggaaagcaaatggaactctgatttaaacagctggggatgaaattcctcaagatgattattcctgaaagtgtggatgcgctggatgcgcagggaacatcaggaaaaggccacggggctctgaacagccccggtccagacagcagcctgtacatccatcccaggacacagcccagcccctccccacaccatacaaggtatcagaaaagtctaggacctatcatttcatcagagacatgatcagaaaagaaactgcttctgccccatttcttgttttggagattactccatctgtccatcaaaagaaacctgtaaatatgaaagaacaaaggttatttcctggagaaaagacaatttattcaacaccaacgagggactcatcatatgggcacaactctggtgtccttctatggagaaaacctcaagtaaagttttattctgcctttgaaaatgcttccaaaagtagaccctgtccccacacaggtcaagactacagagaaggctttgtagaaatgtgtcacctatgtacacctgctacttacacatttcctcttttggaaaaatgagatacttagaataacaagaaaattaagacatactggcctggtgccagcagatggcttttctatagacaaactaggttagtgtggaagatataggttaaaataaactatgctgttttatttatcttcccaacctgattggcagctagacttttttagggtctcatttaatggccctgtttttttcattattatatttaatgatagggcaggatttcgtatgcaagctcttgtttctcaggctgcctgcagaagaagtcgctataaattatctgttgtctacatggtacaaggcccattgactcatctgatgcttgttttgttaatttctttaatatttttatcacggggcagtgggagggcttgggcttttagccacagctgttttaagacttctgatctcctgccctgcaggaataggtgggaagtcattgaatttttacactatagtaatttgcattcccacataagtttgagtgttacgaaaacattcctttaaagggatctgtgctacacaaaatatgccaggacctcacagacaaagccattgctagaaatgtcattccaatgatcagatctggaaacaggctgccataaccacttttccttcttgtagactcagctcacctgtatatttaaactgttcttggcatcttgaaacacctatttctactcaggtactcattgtcctgttactgattcacctttctgatccttttcaaccagttttcccccaaggggggaaattttacttaacctctagtatttgaacaactcaatatttgaattgttgccccatttgcttttacctgtactgtattcttggtcatctcaaatggcgtctaaacccagctactttgcattccagaagtttccattccctccaattccacctaatttttcatctgtcctagttactggctctttcttcatgtcttatttctcttgctttgggagcttaaaagattttacaagacctaattttgggttccttccttggagccatagttaccctgccaagaagagtagaaaatgggttcaactcctgtttcgctccaccaacacctctgtgagtctcatcatcagctgagcgatgatgccttacaggttgcatagcactggaactttcctagagtaacggctctgctgccagggtttctctgggctcattcttccactgacttaattatgatctatgcctaacagagccccagtacaactattttgcagaatggctgttaccctagaattactatagcacatattgagatatagttgtactccctagtagataggaactgaccccaacaataaactttgataataaagacaataggctatggtgattttatttctttacctattagcattgtgaaaagttacattcaaggtattggctacaccttattctccatccggtttggtaccaatatattacatctttcagtcaaaaagtgttcatgagatgcagtgtaagtaatattggtatctgtgaagacacagggaagaacgtgtgcagtggggcaagtttgacataaatagcttttttcctcagtcatgttttgtatgctctcagcagtggtacattaccaaaatcacatgaaagaaatcccataaagggatctgaattttaaatgaaagtatgatgaacccgcaagtcttaattatgcacttttaataaaattagtcctgacaatttacagtgcccataaagtagtagttgattctccaggaataatctggcagtgttatttttccttttcaacccatcagcattaaatgctgagccactctccaagtctgacccctagactaagcttccttactcttactcttcctcccagaggcattttggaatgagtcaaaggcatggtaggacacggcatttacctgtggtcatcacttcaggcaatggaaaggaaaagtgtttgtccttggttgatcagagaagtgggtgataagaacgtgctaaataacaaacctgcacacttgtacctctgaacctaaaatgttttttttttaattcagaacaacaaaagaacatgctaagcgagtcctcccacctgcctggtaaaatacagccagctttatcacacctggttttgcacagtgataaattcctgcaggaaaaaataagttttattctaagtctgaaattatatggtttccaacagctttttccctcgttaaaataattatttttctacatgatgcttgataataagcatttgtttcttaacctaattagagaagcgattgcactcgagtccccacagctggcagtggtgttacagatggaaccagcctttggtggacagagttcagatgtttcaggggctcttgtgaaaatgctaagtattactgtttctaccttactgccctgcactttaccccatcatctcccctccttagaaaatgatttcataggaaaattggcatggagagcagatagtagagtgtagacctgaaatacatgaggcaaaggcagtcttccagcattctatggtcccaccaggtgggtaggtgactaggaattcaggccaggtcctagagagtagtgagaagttttccagtttgcagttttctctgtgctgtatgtacagccatacagcctatggaacctgacattgcagtgggcagcaggacacggtcaaggctcctagctgcctctccatctatggaactatgaaatttcacacatattccctaggcagcattaaggcccaggtatattgagtagtccaaaccaaaaaactatattcgagtatcagtttaaattcttccaagccctaaaaattcttacgtagtttctcacctaaaactaatggcttgtgccaagaactgaaactaagctattgatttttttttaagaagtcttaatctatacataagaaattacatacct

SEQ ID NO: 172 - DNA, 1909 bp, Homo sapiens
  CDS (567)..(1874)
gggtaccactttaagaaggctcaggcgaaccaccttaagatagtgagagtctgcctgccccataatattatcagtccttcaaagtcacttcaaataaacactaacagcagcttggagacattcttccagactcccccttttactccccgaggaaaaacgagcggcggagagctgccagccaaaggctgacggggactttggggttggccttgctccccatctggcggtcatgcggggccattgggcacaaagggatgtagccgccccgcctcctcaaacgggaaccaataggagcccgggccccgcccctggggggagtatttaggagccgatcaggaactcgcttggagagggctagcgaagccgaagggagcgcggctaagagtgccgcaccgcctcacaacctgggaaccggagagtaggggccgtcggctggcaagaacccgccgtgcctcctcggcaagggccatccggtgccacccatgtcgcactagagcagaagagggtgagtcctggaactgcaacctgcacagagctgctctgtactgtccctggtggtcgccgccatgacctggttggtgctgctggggacactgctctgcatgctgcgcgttgggttaggcaccccggactccgagggtttcccgccccgtgcgctccacaactgcccctacaaatgtatctgcgctgccgacctgctaagctgcactggcctagggctgcaggacgtgccagccgagttacctgccgctactgcggacctcgacctgagccacaacgcgctccagcgcatgcgccccggctggttggcgcccctcttccagctgcgcgccctgcacctagaccacaacgaactagatgcgctgggtcgcggcgtcttcgtcaacgccagcggcctgaggctgctcgatctatcatctaacacgttgcgggcgcttggccgccacgacctcgacgggctgggggcgctggagaagctgcttctgttcaataaccgcttggtgcacttggacgagcatgccttccacggcctgcgcgcgctcagccatctctacctgggctgcaacgaactcgcctcgttctccttcgaccacctgcacggtctgagcgccacccacctgcttactctggacctctcctccaaccggctgggacacatctccgtacctgagctggccgcgctggcgggccttccctccaagaaagggccctcatattggcacaacaacccttgtgccttgcagacgtgccgcctctaccacctgctacagcgctggcaccagcggggcctgagcgccgtgcgcgactttgcgcgcgagtacgtatgcttggccttcaaggtacccgcgtcccgcgtgcgcttcttccagcacagccgcgtctttgagaactgctcgtcggccccagctcttggcctagagcggccggaagagcacctgtacgcgctggtgggtcggtccctgaggctttactgcaacaccagcgtcccggccatgcgcattgcctgggtttcgccgcagcaggagcttctcagggcgccaggatcccgcgatggcagcatcgcggtgctggccgacggcagcttggccataggcaacgtacaggagcagcatgcgggactcttcgtgtgcctggccactgggccccgcctgcaccacaaccagacgcacgagtacaacgtgagcgtgcactttccagcgcccagagcccgaggctttcaacacaggcttcaccacactgctgggctgtgccgtgggccttgtgctcatgctgctctacctgttcgccccaacctgccgactcctgccgccgtgcctgccgctgccgccgctggccccaaacacccagcccgctcacaagagctgagcgcacagtagaggcaaccgcagtggggatcctctaagagtcg

SEQ ID NO: 173 - DNA, 1493 bp, Homo sapiens
  CDS (49)..(1095)
cctccaaccacctgcacgcctgcctgccagggcctctctggggcagccatgaagtccctcgtcctgctcctttgtcttgctcagctctggggctgccactcagccccacatggcccagggctgatttatagacaaccgaactgcgatgatccagaaactgaggaagcagctctggtggctatagactacatcaatcaaaaccttccttggggatacaaacacaccttgaaccagattgatgaagtaaaggtgtggcctcagcagccctccggagagctgtttgagattgaaatagacaccctggaaaccacctgccatgtgctggaccccacccctgtggcaagatgcagcgtgaggcagctgaaggagcatgctgtcgaaggagactgtgatttccagctgttgaaactagatggcaagttttccgtggtatacgcctgccccctgctggccccgctgaacgacaccagggtggtgcacgccgcgaaagctgccctggccgccttcaacgctcagaacaacggctccaattttcagctggaggaaatttcccgggctcagcttgtgcccctcccaccttctacctatgtggagtttacagtgtctggcactgactgtgttgctaaagaggccacagaggcagccaagtgtaacctgctggcagaaaagcaatatggcttttgtaaggcaacactcagtgagaagcttggtggggcagaggttgcagtgacctgcacggtgttccaaacacagcccgtgacctcacagccccaaccagaaggtgccaatgaagcagtccccacccccgtggtggacccagatgcacctccgtcccctccacttggcgcacctggactccctccagctggctcacccccagactcccatgtgttactggcagctcctccaggacaccagttgcaccgggcgcactacgacctgcgccacaccttcatgggtgtggtctcattggggtcaccctcaggagaagtgtcgcacccccggaaaacacgcacagtggtgcagcctagtgttggtgctgctgctgggccagtggttcctccatgtccggggaggatcagacacttcaaggtctaggctagacatggcagagatgaggaggtttggcacagaaaacatagccaccattttgtccaagcctgggcatgggtggggggccttgtctgctggccacgcaagtgtcacatgcgatctacattaatatcaagtcttgactccctacttcccgtcattcctcacaggacagaagcagagtgggtggtggttatgtttgacagaaggcattaggttgacaacttgtcatgattttgacggtaagccaccatgattgtgttctctgcctctggttgaccttacaaaaaccattggaactgtgactttgaaaggtgctcttgctaagcttatatgtgcctgttaatgaaagtgcctgaaagaccttccttaataaagaaggttctaagctgaaaaaaaaa

SEQ ID NO: 174 - DNA, 1493 bp, Homo sapiens
  CDS (49)..(1095)
cctccaaccacctgcacgcctgcctgccagggcctctctggggcagccatgaagtccctcgtcctgctcctttgtcttgctcagctctggggctgccactcagccccacatggcccagggctgatttatagacaaccgaactgcgatgatccagaaactgaggaagcagctctggtggctatagactacatcaatcaaaaccttccttggggatacaaacacaccttgaaccagattgatgaagtaaaggtgtggcctcagcagccctccggagagctgtttgagattgaaatagacaccctggaaaccacctgccatgtgctggaccccacccctgtggcaagatgcagcgtgaggcagctgaaggagcatgctgtcgaaggagactgtgatttccagctgttgaaactagatggcaagttttccgtggtatacgcaaaatgtgattccagtccagactcagccgaggacgtgcgcaaggtgtgccaagactgccccctgctggccccgctgaacgacaccagggtggtgcacgccgcgaaagctgccctggccgccttcaacgctcagaacaacggctccaattttcagctggaggaaatttcccgggctcagcttgtgcccctcccaccttctacctatgtggagtttacagtgtctggcactgactgtgttgctaaagaggccacagaggcagccaagtgtaacctgctggcagaaaagcaatatggcttttgtaaggcaacactcagtgagaagcttggtggggcagaggttgcagtgacctgcacggtgttccaaacacagcccgtgacctcacagccccaaccagaaggtgccaatgaagcagtccccacccccgtggtggacccagatgcacctccgtcccctccacttggcgcacctggactccctccagctggctcacccccagactcccatgtgttactggcagctcctccaggacaccagttgcaccgggcgcactacgacctgcgccacaccttcatgggtgtggtctcattggggtcaccctcaggagaagtgtcgcacccccggcctccatgtccggggaggatcagacacttcaaggtctaggctagacatggcagagatgaggaggtttggcacagaaaacatagccaccattttgtccaagcctgggcatgggtggggggccttgtctgctggccacgcaagtgtcacatgcgatctacattaatatcaagtcttgactccctacttcccgtcattcctcacaggacagaagcagagtgggtggtggttatgtttgacagaaggcattaggttgacaacttgtcatgattttgacggtaagccaccatgattgtgttctctgcctctggttgaccttacaaaaaccattggaactgtgactttgaaaggtgctcttgctaagcttatatgtgcctgttaatgaaagtgcctgaaagaccttccttaataaagaaggttctaagctgaaaaaaaaa

SEQ ID NO: 175 - DNA, 1493 bp, Homo sapiens
  CDS (49)..(1095)
cctccaaccacctgcacgcctgcctgccagggcctctctggggcagccatgaagtccctcgtcctgctcctttgtcttgctcagctctggggctgccactcagccccacatggcccagggctgatttatagacaaccgaactgcgatgatccagaaactgaggaagcagctctggtggctatagactacatcaatctgtggcctcagcagccctccggagagctgtttgagattgaaatagacaccctggaaaccacctgccatgtgctggaccccacccctgtggcaagatgcagcgtgaggcagctgaaggagcatgctgtcgaaggagactgtgatttccagctgttgaaactagatggcaagttttccgtggtatacgcaaaatgtgattccagtccagactcagccgaggacgtgcgcaaggtgtgccaagactgccccctgctggccccgctgaacgacaccagggtggtgcacgccgcgaaagctgccctggccgccttcaacgctcagaacaacggctccaattttcagctggaggaaatttcccgggctcagcttgtgcccctcccaccttctacctatgtggagtttacagtgtctggcactgactgtgttgctaaagaggccacagaggcagccaagtgtaacctgctggcagaaaagcaatatggcttttgtaaggcaacactcagtgagaagcttggtggggcagaggttgcagtgacctgcacggtgttccaaacacagcccgtgacctcacagccccaaccagaaggtgccaatgaagcagtccccacccccgtggtggacccagatgcacctccgtcccctccacttggcgcacctggactccctccagctggctcacccccagactcccatgtgttactggcagctcctccaggacaccagttgcaccgggcgcactacgacctgcgccacaccttcatgggtgtggtctcattggggtcaccctcaggagaagtgtcgcacccccggaaaacacgcacagtggtgcagcctagtgttggtgctgctgctgggccagtggttcctccatgtccggggaggatcagacacttcaaggtctaggctagacatggcagagatgaggaggtttggcacagaaaacatagccaccattttgtccaagcctgggcatgggtggggggccttgtctgctggccacgcaagtgtcacatgcgatctacattaatatcaagtcttgactccctacttcccgtcattcctcacaggacagaagcagagtgggtggtggttatgtttgacagaaggcattaggttgacaacttgtcatgattttgacggtaagccaccatgattgtgttctctgcctctggttgaccttacaaaaaccattggaactgtgactttgaaaggtgctcttgctaagcttatatgtgcctgttaatgaaagtgcctgaaagaccttccttaataaagaaggttctaagctgaaaaaaaaa

SEQ ID NO: 176 - DNA, 2469 bp, Homo sapiens
  CDS (117)..(1979)
ggcacgaggcctcgtgccgcacgttgtcgcgggccagtaacgtcatcagacgtgtgtgtgtccctgcggcgctaagaaggggagactgaggctgaggctggggaacatcgggcagcatgagcggctgcgggctcttcctgcgcaccacggctgcggctcgtgcctgccggggtctggtggtctctaccgcgaaccggcggctactgcgcaccagcccgcctgtacgagctttcgccaaagagcttttcctaggcaaaatcaagaagaaagaagttttcccatttccagaagttagccaagatgaacttaatgaaatcaatcagttcttgggacccgtggaaaaattcttcactgaagaggtggactcccgaaaaattgaccaggaagggaaaatcccagatgaaactttggagaaattgaagagcctagggctttttgggctgcaagtcccagaagaatatggtggcctgggcttctccaacaccatgtactcaagactaggggagatcatcagcatggatgggtccatcactgtgaccctggcagcgcaccaggctattggcctcaaggggatcatcttggctggcactgaggagcagaaagccaaatacttgcctaaactggcgtccggggagcacattgcagccttctgcctcacggagccagccagtgggagcgatgcagcctcaatccggagcagagccacactaagtgaagacaagaagcactacatcctcaatggctccaaggtctggattactaatggaggactggccaatatttttactgtgtttgcaaagactgaggtcgttgattctgatggatcagtgaaagacaaaatcacagcattcatagtagaaagagactttggtggagtcactaatgggaaacccgaagataaattaggcattcggggctccaacacttgtgaagtccattttgaaaacaccaagatacctgtggaaaacatccttggagaggtcggagatgggtttaaggtggccatgaacatcctcaacagcggccggttcagcatgggcagcgtcgtggctgggctgctcaagagattgattgaaatgactgctgagtacgcctgcacaaggaaacagtttaacaagaggctcagtgaatttggattgattcaggagaaatttgcactgatggctcagaaggcttacgtcatggagagtatgacctacctcacagcagggatgctggaccaacctggctttcccgactgctccatcgaggcagccatggtgaaggtgttcagctccgaggccgcctggcagtgtgtgagtgaggcgctgcagatcctcgggggcttgggctacacaagggactatccgtacgagcgcatattgcgtgacacccgcatcctcctcatcttcgagggaaccaatgagattctccggatgtacatcgccctgacgggtctgcagcatgccggccgcatcctgactaccaggatccatgagcttaaacaggccaaagtgagcacagtcatggataccgttggccggaggcttcgggactccctgggccgaactgtggacctggggctgacaggcaaccatggagttgtgcaccccagtcttgcggacagtgccaacaagtttgaggagaacacctactgcttcggccggaccgtggagacactgctgctccgctttggcaagaccatcatggaggagcagctggtactgaagcgggtggccaacatcctcatcaacctgtatggcatgacggccgtgctgtcgcgggccagccgctccatccgcattgggctccgcaaccacgaccacgaggttctcttggccaacaccttctgcgtggaagcttacttgcagaatctcttcagcctctctcagctggacaagtatgctccagaaaacctagatgagcagattaagaaagtgtcccagcagatccttgagaagcgagcctatatctgtgcccaccctctggacaggacatgctgaggcaggggacagtgtcccctgctaccgcctgcccctacccatggcccgttgctggatgactgttactcttttttcagaaggtgttgggattatcacaggttaagccttttgttccccgtctgcacctgaagggttgtcgcctggcctgggagagcctcttccaggttttgacctgcaggcagtgctctctaacaggaccatcacagcttctgaactgagccagagagagaatggaattgctgacccctggaactggcgggtattctggtcattgaggagacaccatagtggaaactggggcttatgctgctgcctccagggtgtgaggtgggtggggacctgtgtcaggtgtggatagccatttctgctcaaccacacattctctaagaaacagcttgaaagctctgtctgggtcattcatttaaactagaagcagaggcacttaaaacatgtaccaggaaccatttaacaaagaatataaaatgtc

SEQ ID NO: 177 - DNA, 1915 bp, Homo sapiens
  CDS (506)..(1912)
cagttccccgcccccccgtttttacccccccctgctcttcttttataaaccgcccccttttggggcccctttgtccacaaaacctggtttcccctaataccttgtgccccccgggaaatttttttaccccccccccctctttttttttcttattgatctaacatactagttttttttagtgagaccccatctcaatttaataaataaataaggaagaaagagggagacagtagctgctcaaatcatgggtgggaaagctgggcctgggagcgtttagctggtggggtcttggcgaaggcgggggacgggcagaaccttgggttcatcatctctgggaaccctttgtgcacccatcacctagcaacaggatgcagccttccctcggccctggaaggccaggtcacaaaggccatcagggcttgtccgggagccggtatcccctaagactgccctgtgcctctcgcggcgatcccggcccagcggctgggcgttagggccaccgctcatgtgcgtcatctgcttcgtgaaggcgctggtgcgcgtgttcaagatctacctgaccgccagctacacctacccattccgcggctggcccgtggccttccgctgggatgacgtgcgcgccgtgggccggagcagcagccaccgggcgctgacctgcgcggcagccgcggcgggcgtgtggttgctgcgggacgagacgctgggcggggatgcgctggggcggcctccacgtggggcgcgcagccaggcgcagtgcctcttgcagcagctccgcgagctgcccggccagctcgctagctacgcgctggcccactcgctgggccgctggctcgtgtaccccggctccgtgtccctgatgacgcgcgcgctgctgccgctgctgcagcagggccaagagcgcctcgtggagcgctaccacggccggcgcgccaagctggtggcctgtgacggcaacgagatcgacactatgttcatggaccgccgccagcacccgggcagccacgtgcacgggccgcgcctcgtcatctgctgcgaaggcaacgcgggcttctacgagatgggctgtctgtctgcaccgctcgaggccggctactccgtgctgggctggaaccaccccggcttcggcagcagcactggcgtgcccttccctcagcacgacgccaacgccatggacgtggtggtcgagtacgcactgcaccgcctgcacttcccgcccgcgcacctggtggtctacggctggtctgttggcggcttcacggccacctgggccaccatgacctacccggagctgggtgcactggtgctggacgccaccttcgacgaccttgtgccgctggcgctgaaggtcatgccccacagttggaaggggctggtggtgcgcaccgtgcgcgagcacttcaacctcaacgtggccgagcagctgtgctgctacccggggccggtgctgctgctccgacgcacgcaggatgacgtggtcagcacttcgggccgcctgcgccccctgtcacctggtgacgtggagggcaaccggggcaatgagctgctgctgcgcctgctggagcaccgctaccccgtcgtgatggcgcgagagggccgcgccgtcgtcacccgctggctgcgcgctggcagcttggcgcaggaggccgccttctatgcacgctaccgcgtggacgaggactggtgcctggcgctgctgcgctcctaccgtgcacgctgcgaagaggagctggagggcgaggaggccctggggccacacggacccgccttcccatggctggtgggccagggcctgagctcgcggcggcgccggcgcctcgcactgttcctggctcggaagcacctcaagaacgtggaggcgactcacttcagccctctggagcctgaggagtttcagttgccctggcggctgtaa

SEQ ID NO: 178 - DNA, 1720 bp, Homo sapiens
  CDS (117)..(1220)
cggcttctgcaaccaagcgggtcttacccccggtcctccgcgtctccagtcctcgcacctggaaccccaacgtccccgagagtccccgaatccccgctcccaggctacctaagaggatgagcggtgctccgacggccggggcagccctgatgctctgcgccgccaccgccgtgctactgagcgctcagggcggacccgtgcagtccaagtcgccgcgctttgcgtcctgggacgagatgaatgtcctggcgcacggactcctgcagctcggccaggggctgcgcgaacacgcggagcgcacccgcagtcagctgagcgcgctggagcggcgcctgagcgcgtgcgggtccgcctgtcagggaaccgaggggtccaccgacctcccgttagcccctgagagccgggtggaccctgaggtccttcacagcctgcagacacaactcaaggctcagaacagcaggatccagcaactcttccacaaggtggcccagcagcagcggcacctggagaagcagcacctgcgaattcagcatctgcaaagccagtttggcctcctggaccacaagcacctagaccatgaggtggccaagcctgcccgaagaaagaggctgcccgagatggcccagccagttgacccggctcacaatgtcagccgcctgcaccatggaggctggacagtaattcagaggcgccacgatggctcagtggacttcaaccggccctgggaagcctacaaggcggggtttggggatccccacggcgagttctggctgggtctggagaaggtgcatagcatcacgggggaccgcaacagccgcctggccgtgcagctgcgggactgggatggcaacgccgagttgctgcagttctccgtgcacctgggtggcgaggacacggcctatagcctgcagctcactgcacccgtggccggccagctgggcgccaccaccgtcccacccagcggcctctccgtacccttctccacttgggaccaggatcacgacctccgcagggacaagaactgcgccaagagcctctctggaggctggtggtttggcacctgcagccattccaacctcaacggccagtacttccgctccatcccacagcagcggcagaagcttaagaagggaatcttctggaagacctggcggggccgctactacccgctgcaggccaccaccatgttgatccagcccatggcagcagaggcagcctcctagcgtcctggctgggcctggtcccaggcccacgaaagacggtgactcttggctctgcccgaggatgtggccgttccctgcctgggcaggggctccaaggaggggccatctggaaacttgtggacagagaagaagaccacgactggagaagccccctttctgagtgcaggggggctgcatgcgttgcctcctgagatcgaggctgcaggatatgctcagactctagaggcgtggaccaaggggcatggagcttcactccttgctggccagggagttggggactcagagggaccacttggggccagccagactggcctcaatggcggactcagtcacattgactgacggggaccagggcttgtgtgggtcgagagcgccctcatggtgctggtgctgttgtgtgtaggtcccctggggacacaagcaggcgccaatggtatctgggcggagctcacagagttcttggaataaaagcaacctcagaacaaaaaaaaaaaaaa

SEQ ID NO: 179 - DNA, 1044 bp, Homo sapiens
  CDS (6)..(755)
acacaatggtaagaatggtgcctgtcctgctgtctctgctgctgcttctgggtcctgctgtcccccaggagaaccaagatggtcgttactctctgacctatatctacactgggctgtccaagcatgttgaagacgtccccgcgtttcaggcccttggctcactcaatgacctccagttctttagatacaacagtaaagacaggaagtctcagcccatgggactctggagacaggtggaaggaatggaggattggaagcaggacagccaacttcagaaggccagggaggacatctttatggagaccctgaaagacattgtggagtattacaacgacagtaacgcccagataaccaagcagaagtgggaggcagaaccagtctacgtgcagcgggccaaggcttacctggaggaggagtgccctgcgactctgcggaaatacctgaaatacagcaaaaatatcctggaccggcaagatcctccctctgtggtggtcaccagccaccaggccccaggagaaaagaagaaactgaagtgcctggcctacgacttctacccagggaaaattgatgtgcactggactcgggccggcgaggtgcaggagcctgagttacggggagatgttcttcacaatggaaatggcacttaccagtcctgggtggtggtggcagtgcccccgcaggacacagccccctactcctgccacgtgcagcacagcagcctggcccagcccctcgtggtgccctgggaggccagctaggaagcaagggttggaggcaatgtgggatctcagacccagtagctgcccttcctgcctgatgtgggagctgaaccacagaaatcacagtcaatggatccacaaggcctgaggagcagtgtggggggacagacaggaggtggatttggagaccgaagactgggatgcctgtcttgagtagacttggacccaaaaaatcatctcaccttgagcccacccccaccccattgtctaatctgtagaagctaataaataatcatccctccttgcctagcataaaaaaaaaaaa

SEQ ID NO: 180 - DNA, 2977 bp, Homo sapiens
  CDS (374)..(2974)
ggacagtggagacgcgccttctcggctctggtccgcgccctggggccctggctccctggaggggctggggaactggaagctgggccgagagagttcccgctgcagctatcgcgcagtccctcctgcgcccgggcgcccccagcgggttccgggaggcgcccggtgagcccacgtctgttgcggcggagcgagcgcgctccgggagggccgagagccggcggggctggcaggagctctcgggcgcccgcctccctccttcgcggacggtctcccgacacgccggctgagagcccttttcgactgtgagctgcggcagctgagcagaggcggcggcgcgggacctgcagtcgccagggattccctccaggtgacgatgctctggttctccggcgtcggggctctggctgagcgttactgccgccgctcgcctgggattacgtgctgcgtcttgctgctactcaattgctcgggggtccccatgtctctggcttcctccttcttgacaggttctgttgcaaaatgtgaaaatgaaggtgaagtcctccagattccatttatcacagacaacccttgcataatgtgtgtctgcttgaacaaggaagtgacatgtaagagagagaagtgccccgtgctgtcccgagactgtgccctggccatcaagcagaggggagcctgttgtgaacagtgcaaaggttgcacctatgaaggaaatacctataacagctccttcaaatggcagagcccggctgagccttgtgttctacgccagtgccaggagggcgttgtcacagagtctggggtgcgctgtgttgttcattgtaaaaaccctttggagcatctgggaatgtgctgccccacatgtccaggctgtgtgtttgagggtgtgcagtatcaagaaggggaggaatttcagccagaaggaagcaaatgtaccaagtgttcctgcactggaggcaggacacaatgtgtgagagaagtctgtcccattctctcctgtccccagcaccttagtcacatacccccaggacagtgctgccccaaatgtttgggtcagaggaaagtgtttgacctcccttttgggagctgcctctttcgaagtgatgtttatgacaatggatcctcatttctgtacgataactgcacagcttgtacctgcagggactctactgtggtttgcaagaggaagtgctcccaccctggtggctgtgaccaaggccaggagggctgttgtgaagagtgcctcctacgagtgcccccagaagacatcaaagtatgcaaatttggcaacaagattttccaggatggagagatgtggtcctctatcaattgtaccatctgtgcttgtgtgaaaggcaggacggagtgtcgcaataagcagtgcattcccatcagtagctgcccacagggcaaaattctcaacagaaaaggatgctgtcctatttgcactgaaaagcccggcgtttgcacggtgtttggagatccccactacaacacttttgacggtcggacatttaactttcaggggacgtgtcagtacgttttgacaaaagactgctcctcccctgcctcgcccttccaggtgctggtgaagaacgacgcccgccggacacgctccttctcgtggaccaagtcggtggagctggtgctgggcgagagcagggtcagcctgcagcagcacctcaccgtgcgctggaacggctcgcgcatcgcgctcccctgccgcgcgccacacttccacatcgacctggatggctacctcttgaaagtgaccaccaaagcaggtttggaaatatcttgggatggagacagttttgtagaagtcatggctgcgccgcatctcaagggcaagctctgtggtctttgtggcaactacaatggacataaacgtgatgacttaattggtggagatggaaacttcaagtttgatgtggatgactttgctgaatcttggagggtggagtccaatgagttctgcaacagacctcagagaaagccagtgcctgaactgtgtcaagggacagtcaaggtaaagctccgggcccatcgagaatgccaaaagctcaaatcctgggagtttcagacctgccactcgactgtggactacgccactttctaccgccagtatcaaacctaccttcccgctgtggacttaggccacaggataggacaagccctgggcagcctggggcacaacgagaggccaggagatgagctatgcctttgtgggtcaaactggggaaagttttttattccttgtgcctatgaaataccagcaatgggctttttccctaactcgactcacatcttggaagaaattgttgcaactgaacacctgctacatgctaggttctgtcatagggatggcgatttggaacttagcaagagagacaaagctcttccttcagaaaatcattgcctagttctcatgaggctggatgaggtttcccttgtaaatcccagatggaatgaccaaggtgtctctttctcctcgtcacatcaccagcaaggcctagtggctcttgtgcgaacaggcctgagtgctgtggtatcaggtcgccctttgaaaaatcaggatatccacctgggtgccagaactccttgcaagcaagaggacctggggtgggtgtcctcagagcagcaggggcctctcagagaaggcacactggcctctgtgctgttttgggagcagtatcagggctttgggcttgggctcagagctgtgctgggtttgacggccatccaggactctgtccgtttcccaatcaacttggcaaaaattaaaattgatgggggcatgtgcaaatacgaaataggagtggaggcttttgcattcctggacactccaacacattgtactctgtttattcggaaatctgagactcagtctcatttttcttctgacttggcaagtaaaaggagcagcagggttgctgcactgtccatgacacttgcacacagagatggagcagttgtgtag

SEQ ID NO: 181 - DNA, 1583 bp, Homo sapiens
  CDS (103)..(1374)
gggcttctgaggcgtctaccttcccagtcctaggactgatctccaggaccagcactcttctcccagcccttagggtcctgctcggccaaggccttccctgccatgcgacctgtcagtgtctggcagtggagcccctgggggctgctgctgtgcctgctgtgcagttcgtgcttggggtctccgtccccttccacgggccctgagaagaaggccgggagccaggggcttcggttccggctggctggcttccccaggaagccctacgagggccgcgtggagatacagcgagctggtgaatggggcaccatctgcgatgatgacttcacgctgcaggctgcccacatcctctgccgggagctgggcttcacagaggccacaggctggacccacagtgccaaatatggccctggaacaggccgcatctggctggacaacttgagctgcagtgggaccgagcagagtgtgactgaatgtgcctcccggggctgggggaacagtgactgtacgcacgatgaggatgctggggtcatctgcaaagaccagcgcctccctggcttctcggactccaatgtcattgaggtagagcatcacctgcaagtggaggaggtgcgaattcgacccgccgttgggtggggcagacgacccctgcccgtgacggaggggctggtggaagtcaggcttcctgacggctggtcgcaagtgtgcgacaaaggctggagcgcccacaacagccacgtggtctgcgggatgctgggcttccccagcgaaaagagggtcaacgcggccttctacaggctgctagcccaacggcagcaacactcctttggtctgcatggggtggcgtgcgtgggcacggaggcccacctctccctctgttccctggagttctatcgtgccaatgacaccgccaggtgccccggggggggccctgcagtggtgagctgtgtgccaggccctgtctacgcggcatccagtggccagaagaagcaacaacagtcgaagcctcagggggaggcccgtgtccgtctaaagggcggcgcccaccctggagagggccgggtagaagtcctgaaggccagcacatggggcacagtctgtgaccgcaagtgggacctgcatgcagccagcgtggtgtgtcgggagctgggcttcgggagtgctcgagaagctctgagtggcgctcgcatggggcagggcatgggtgctatccacctgagtgaagttcgctgctctggacaggagctctccctctggaagtgcccccacaagaacatcacagctgaggattgttcacatagccaggatgccggggtccggtgcaacctaccttacactggggcagagaccagggtcagtcatcctctctaccttggttgaggtctctttcatcctatccaggtctggtctccaatctacagtccaatggcccccagcccattgccccaggcccctgccctcctgcagctcccacctgacccatcacttgctagcccattatgtgcctgagtcacgcttcagccacatctgttagagactcccactacctcaccccaaagctttctccagcgctttcattctgtgtc

SEQ ID NO: 182 - DNA, 1169 bp, Homo sapiens
  CDS (175)..(1095)
cggccgcccacctgccgggtaagggcccctcgggcccgtggtcgggcatcgattggccccgcctggcgcagcccccgcccctgcagcggactgcggtgctcatcagacctgagcagttgctccggcggcgctcggggagggagccagcagcctagggcctaggcccgggccaccatggcgctgcctccaggcccagccgccctccggcacacactgctgctcctgccagcccttctgagctcaggttggggggagttggagccacaaatagatggtcagacctgggctgagcgggcacttcgggagaatgaacgccacgccttcacctgccgggtggcaggggggcctggcacccccagattggcctggtatctggatggacagctgcaggaggccagcacctcaagactgctgagcgtgggaggggaggccttctctggaggcaccagcaccttcactgtcactgcccatcgggcccagcatgagctcaactgctctctgcaggaccccagaagtggccgatcagccaacgcctctgtcatccttaatgtgcaattcaagccagagattgcccaagtcggcgccaagtaccaggaagctcagggcccaggcctcctggttgtcctgtttgccctggtgcgtgccaacccgccggccaatgtcacctggatcgaccaggatgggccagtgactgtcaacacctctgacttcctggtgctggatgcgcagaactacccctggctcaccaaccacacggtgcagctgcagctccgcagcctggcacacaacctctcggtggtggccaccaatgacgtgggtgtcaccagtgcgtcgcttccagccccaggcccctcccggcacccatctctgatatcaagtgactccaacaacctaaaactcaacaacgtgcgcctgccacgggagaacatgtccctcccatccaaccttcagctcaatgacctcactccagattccagagcagtgaaaccagcagaccggcagatggctcagaacaacagccggccagagcttctggacccggagcccggcggcctcctcaccagccaaggaagaagaaatcaggacaaagacgcataacagagggaagaccatgggaagacacagaagatggccaagaagagacccctcagaagaaatcaatcttggtg

SEQ ID NO: 183 - DNA, 694 bp, Homo sapiens
  CDS (100)..(579)
cgacggcatcggagtttcagggacgacccacgcgcccgcgtaccttgatatggacaccactggcaccattgcttcgtacacccgctctgatgcaggagaatgggtactcatcacacgctgtggatgggactggccctgctgggggggctgggcgacctgcaggcagcaccggaggcccagggctccgtgcagcccaacttccagcaggacaagttcctggggcgctggttcagcgcgggcctcgcctccaactcgagctggctccgggagaagaaggcggcgttgtccatgtgcaagtctgtggtggcccctgccacggatggtggcctcaacctgacctccaccttcctcaggaaaaaccagtgtgagacccgaaccatgctgctgcagcccgcggggtccctcggctcctacagctaccggagtccccgtgagtggggcctccaccggccccctgggcccagcctgggggcgacacttgccgggacgactctgggccagccccctgccgcggagatccatggggtgggaggtgatggctgccccaccagcgtcagaggcaaaggccaggcctgggcgtgactacccatgcacaagtgttagggacagagagacccttcctccagggggttggatcctctctggagcccaccattgtcttgtcaggccccttccctgccctctggagttttcc

SEQ ID NO: 184 - DNA, 2811 bp, Homo sapiens
  CDS (773)..(2533)
ctggcttttttactccctccgatctcaggttcacctgggcttcttccaggaagccttcctggatctcctcagggccaaggaagctgtgcctcttctgtactcccacaacacaccacaagacaagccacagcctccctcctcccaacacctgcacggatgctgtgtcccccagggctgtcagctccgggctggggcactgcatgcctacctgggagaagttgagcccgttgttgaggggatggcactgctcctccacctgctccacagcccctgtggtcttcttcatcttctcagcctgctgggccaggtagaggtcgagcacgggcacaccacggaagcgcacgtccctctctgtgagcgagtttaccatgagcatcacccagacgggcctcttgcgctcccagttgcccgcgatggcattgaataggtagtcagcatagagccccttgccccgctgagcgggcgtcatccaggagggcatcatcaacttcacgtagtccaggtggcgcttcaagcgccagtaaagctcgtggggcagcacgtcctgcaggttttccccgtgcggcagcagctggcagctggccagggccgagatggtgtaggggtctgtaaggtccagctcaaagtagacacgggtgctagcctggaaggctgccttggagttgtccgggatgaagtcccagacgcgggtgtaggggacgtgaatagtgccaaacaggtaggccggaggatcacgccgaatcgtccacaggaaggagttcaagtccctctgatgcacgccgccctggcggggccgctgctcgccgccctcctcgccaccgctcgcgcccgcccgcagcccccggacggaggacagtgccggccgcccggatcgcagagggacttgaactccttcctgtggacgattcggcgtgatcctccggcctacctgtttggcactattcacgtcccctacacccgcgtctgggacttcatcccggacaactccaaggcagccttccaggctagcacccgtgtctactttgagctggaccttacagacccctacaccatctcggccctggccagctgccagctgctgccgcacggggaaaacctgcaggacgtgctgccccacgagctttactggcgcttgaagcgccacctggactacgtgaagttgatgatgccctcctggatgacgcccgctcagcggggcaaggggctctatgctgactacctattcaatgccatcgcgggcaactgggagcgcaagaggcccgtctgggtgatgctcatggtaaactcgctcacagagagggacgtgcgcttccgtggtgtgcccgtgctcgacctctacctggcccagcaggctgagaagatgaagaagaccacaggggctgtggagcaggtggaggagcagtgccatcccctcaacaacgggctcaacttctcccaggtgctgtttgccctgaaccaaaccctgctgcagcaggagagtgtgcgggccgggagcctgcaggcctcctacaccacggaggacctcatcaagcactacaactgcggagacctcagcgcagtcatcttcaaccacgacacatcccagctgcccaactttatcaacaccaccctcccgccacacgagcaggtgacggcccaggagattgacagctacttccgccaggagctcatctacaagaggaatgagcgcatggggaagagggtcatggcgcttctacgggagaacgaggacaagatctgcttctttgccttcggagcaggtcactttctggggaacaacacagtcatcgacatcctgcggcaggcagggctggaggtggaccacacacccgccgggcaggccatacacagccctgccccccagagcccagcgccctctcctgaggggacctcgacgagcccggccccagtgaccccagctgccgctgtccccgaagcaccctctgtgacccccaccgccccaccagaggatgaggatccagccctgtccccacacctcctgctccccgacagcctcagccagctggaggagtttggccggcagaggaagtggcacaagaggcagagcacacaccagcggccgcggcagttcaatgacctctgggtccgcatcgaggacagagcccggcaaagggggtccgtgtggactctggagctcagccaggctggttgtgtggctctgggctgcccggtttgcctgctcaagctccttgttcccttctccattgtattaggcaaaatagacctgaaaaaatcagatctgagccccaaggcttctgcccaggacgaggctgccgatggtgactctgccatgtgcttcctcctttccagcaccaccgcctcaccacccccgctgcccctgcagcccacccacagctcggggaccgccaagccccccttccagctttcagaccagctacaacagcaggacccgccagggcccgccagcagctcggcacccaccctgggccttctccccgccatcgccaccaccatcgctgtctgcttcctgctgcatagccttgggccctcctgacctcggccaccccaagtggagaagccagagaaatgacacaggggtcttcggccacacccaactgctcctgccaccacctccagggggtgcccaacacgtcgagggcagtccacatgggattggctagacactctagagctttactgtacccaagttacatcttcttttttgtagaaggatcttaatttcccatagtgctatggggctcttttgtaaaatacgtgtccatattaaaaaagaaaaatgtaaaaatactcccgataaaaaaaaaaaaa

SEQ ID NO: 185 - DNA, 2807 bp, Homo sapiens
  CDS (458)..(1168)
ctacgttgtcttttcacttctctggggaggagtgatctggccgttcctcaactaccagaggatgtactacgtgttcatccagatgctgtccagcgggcccgcctggctggccatcgtgctgctggtgaccatcagcctccttcccgacgtcctcaagaaagtcctgtgccggcagctgtggccaacagcaacagagagagtccagaatgggtgcgcacagcctcgggaccgcgactcagaattcacccctcttgcctctctgcagagcccaggctaccagagcacctgtccctcggccgcctggtacagctcccactctcagcaggtgacactcgcggcctggaaggagaaggtgtccacggagcccccacccatcctcggcggttcccatcaccactgcagttccatcccaagtcacagctgccctaggtcccgtgtgggaatgctcgtgtgatggatggtcctaagcctgtggagactgtgcacgtgcctcttcctggcccccagcaggcaaggaggggggtcacaggccttgccctcgagcatggcaccctggccgcctggacccagcactgtggttgttgagccacaccagtggcctctgggcattcggctcaacgcaggagggacattctgctggcccaccctgcgcgctgtcatgcagaggccattcccccaggcctgtgtcttcacccacctgccatcattggcctttgctgtcactgggagagaagagccgtccagggacccatggtggcccacatgtggatgccacatgctgctgtttcctgcttgcccggccaccacccatgccctccatagggtgaggtggagccatggtggtgcgtcctttactcaacaaccctccaatccggatgctgtgggaagggccgggtcactcggataccatcatccctgcggatgcaccgccgtaccctgctcatctgggagtggtttccctgcggttacgtccaagcccgcctgccctgtgtgttggggctggctgagtttcggtctccccatcaccggccgcctcgtggagaaggcagtgccacgtgggaggacaaggccacgccggcagcttccagccctgccgcagaagtgccaggatgtccatcagccactcgccagggcacggagccgtcagtccactgttacgggagaatgttgatttcgcgggtgcgagggccgggagacagatacttggctgtgatgagcagacatcctctgtccccgtggaggggtcaacaccaaggtggtgttcgtgcaccagaacctgtctcgggctgacgggggtggcacacaggacacgggtggatcccaacaggcagcaccgcacctccgcccgcctcccgcactgcagctccgcccgccgggctctgcgtctccacgtcccctcgtcccatccccacgtcccctcatcccgtcacctcgtccccacatccccttgccccgtcacctcgtcctcatgtccccttgtcctgtcacctcgtccccacgtcccctcgtctcatccccacgtcctctcgtccccttgtcccgtccccacataccctcgtccccatgtccccacgcagggctctccttcgtcttaggatctgtccagcgctgctctgggtgggttagcaaccccagggctgctgtgataggaagtccctgttgttctccgtactggcatttctatttctagaaataatatttgacatagccttaatggtccttaaagaagacatttcagtgtgagattcagacttcagacgctgaaactgctgcctttcaggaaagcaccaccaacgctggaggaggagccggccctcacgcccgccccgcgccacgctgtggaacggggctccggcaagtgaaacccagagggtgtttccgaggtgctcgacagtaggtatttttggaagctcagatttcaccatttgattgtataatcttttacctataaaatatttatttgaagtagagggtaaatcagcggtaagaacagtgaacacagtggttgggataaaataaggtgacaaacatcacaccaaagatgagggtagcgagcaactggcttgagcagacagaacggggaagactccactctgtcccgaggggccagccgcaggcgtccccagggccaccctgccctgaggtccttgtgtggccgccctggcttggcagccctgcccacgctgcccccgcaaacaatggtgtgtgcgtttttacagccctttttaggaacccaatatgggcataaatgtaacacctgtagcgggggcagattctctgtatgttcagttaacaaattatttgtaatgtatttttttagaaatcttaaaattgcctttgcactgaagtattttcatagctgtttatatctcttttattcatttatttaacatactgtctaattttaaaaataggtttttaaagctttcatttttaagtttatgaaattttggccactttacatttagattctggtgagagttttgactgaatgttccaatctctgatgaatgcgaattttcagatttgattttattctctacacacacctcttcttttcttggtatttctggtggcagtgattagttgaacagcacatttaaggcacgataatttgctacactttttctttacaatttgttgcaatttcatctgctttctatgtttcattgttaattgccatccttcagccttaaaaatagaagattctcacgtgaaggtttagtaagtttgggtcccagctctgcctgtgtggagatagtcaccatgtacctctgacaacaagttttagtgtgaaagtcactaat

SEQ ID NO: 186 - DNA, 508 bp, Homo sapiens
  CDS (106)..(471)
agaaatctggagatcttaatttatttgccctatttcaggccttaccagctcctacaaagcagcaatattaataatggttgaatttttaattttatcctgctcagcatggctgctttagggactgttctcttcagtgtccggaggctgcactgcagcgcagccgcttgggcgggcggccagtggcgactacagcagggactggctgccaacccctccggctacgggccccttaccgagctcccagactggtcatatgcggatggccgccctgctcccccaatgaaaggccagcttcgaagaaaagctgaaagggagacgtttgcaagacgagttgtactgctgtcacaggaaatggacgctggattacaagcatggcagctcaggcagcagaagttgcaggaagaacaaaggaagcaggaaaatgctcttaaacccaaaggggcttcactgaagagcccacttccaagtcaataaaaagcaactcctgcctcccttcctcaaaaaaaaa

SEQ ID NO: 187 - DNA, 1778 bp, Homo sapiens
  CDS (135)..(1622)
acgatctcgtggtcccgccgcggcgcagggctggggcgcctgggttccccttgggtggagcagcggcagcagagcgggaaagtggtggaggatgatcttgcggccaaaggggacctcggcgcagtaatgtcaacatgatgtttcgctcagatcgaatgtggagctgccattggaaatggaagcccagtcctctcctgttcttatttgctttatatatcatgtgtgttcctcactcagtgtggggatgtgccaactgccgagtggttttgtccaacccttctgggacctttacttctccatgctaccctaacgactacccaaacagccaggcttgcatgtggacgctccgagcccccaccggttatatcattcagataacatttaacgactttgacattgaagaagctcccaattgcatttatgactcattatcccttgataatggagagagccagactaaattttgtggagcaactgccaaaggcctatcatttaactcaagtgcgaatgagatgcatgtgtccttttcaagtgactttagcatccagaagaaaggtttcaatgccagctacatcaaagttgccgtgtccttaaggaatcaaaaggtcattttaccccagacatcagatgcttaccaggtatctgttgcaaaaagcatctctattccagagctcagtgctttcacactctgctttgaagcaaccaaagttggccatgaagacagtgattggacagctttctcctactcaaatgcatccttcacacaattgctcagttttggaaaggccaagagtggctactttctatccatttctgattcaaaatgtttgttgaataatgcattacctgtcaaagaaaaagaagacatttttgcagaaagctttgaacagctctgccttgtttggaataattctttgggctctattggtgtaaatttcaaaagaaactatgaaacagttccatgtgattctaccattagtaaagttattcctgggaatgggaaattgttgttgggctccaatcaaaatgaaattgtctctctaaaaggggacatttataactttcgactttggaattttaccatgaatgccaaaatcctctccaacctcagctgtaatgtgaaagggaatgtagtcgactggcaaaatgacttctggaatatcccaaacctagctctgaaagctgaaagcaacctaagctgtggttcctacctgatcccgctcccagcagcagaactggccagctgtgcagacctggggaccctctgtcaagatggaattatctatagaatatccgtagtgattcagaacatccttcgtcaccctgaggtaaaagtacagagcaaggtggcagaatggctcaattcaaccttccaaaattggaactacacggtttatgtcgttaatatcagttttcacctgagtgctggagaggacaagattaaagtcaagagaagccttgaggatgagccaaggttggtgctttgcgcccttctagtttacaatgctaccaacaatactaatttggaaggaaaaatcattcagcagaagctcctaaaaaataatgagtccttggatgaaggcttgaggctacatacagtgaatgtgagacaactgggtaagtgactaatttttttataatatgcattttatacaactgtatattcaggtttacttgaaacaacagcagaaattttctttatgcgctatttgtttatgtaagttttttttctgatgtggaagttcagtaacaaatgaatgacatagcagaaaaaaaaa

SEQ ID NO: 188 - DNA, 1915 bp, Homo sapiens
  CDS (289)..(1797)
cttaggaaggggtcccttcaagggcaaataaaatgcgatagtccttgcaacactgaagcatggagtatcctgtgaggcatgaacttgcttgatgcagcatgaatgcaccccaagaaacatgggcatgccctccaagtgcaagcataccccacaagtgggtagccatagagccagaagggcaggttccctctgggcagagaaacaaagctctatatgcacagcccagcaaagagcagcacacagctgaaagaaaaactcagaagacagagctgaaaaagaaaactggggatggatctcattccaaactttgccatggaaacatgggttcttgtggctaccagcctggtactcctctatatttatgggacccattcacataaactttttaagaagctgggaattcctgggccaacccctctgccttttctgggaactattttgttctaccttaggggtctttggaattttgacagagaatgtaatgaaaaatacggagaaatgtgggggctgtatgaggggcaacagcccatgctggtcatcatggatcccgacatgatcaaaacagtgttagtgaaagaatgttactctgtcttcacaaaccagatgcctttaggtccaatgggatttctgaaaagtgccttaagttttgctgaagatgaagaatggaagagaatacgaacattgctatctccagctttcaccagtgtaaaattcaaggaaatggtccccatcatttcccaatgtggagatatgttggtgagaagcctgaggcaggaagcagagaacagcaagtccatcaacttgaaagatttctttggggcctacaccatggatgtaatcactggcacattatttggagtgaacttggattctctcaacaatccacaagatccctttctgaagaatatgaagaagcttttaaaattggattttttggatccctttttactcttaatagcactctttccatttcttaccccagtttttgaagccctaaatatcggtttgtttccaaaagatgttacccattttttaaaaaattccattgaaaggatgaaagaaagtcgcctcaaagataaacaaaagcatcgagtagatttctttcaacagatgatcgactcccagaattccaaagaaacaaagtcccataaagctctgtctgatctggagcttgtggcccagtcaattatcatcatttttgctgcctatgacacaactagcaccactctccccttcattatgtatgaactggccactcaccctgatgtccagcagaaactgcaggaggagattgacgcagttttacccaataaggcacctgtcacctacgatgccctggtacagatggagtaccttgacatggtggtgaatgaaacgctcagattattcccagttgttagtagagttacgagagtctgcaagaaagatattgaaatcaatggagtgttcattcccaaagggttagcagtgatggttccaatctatgctcttcaccatgacccaaagtactggacagagcctgagaagttctgccctgaaaggttcagtaagaagaacaaggacagcatagatctttacagatacataccttttggagctggaccccgaaactgcattggcatgaggtttgctctcacaaacataaaacttgctgtcattagagcactgcagaacttctccttcaaaccttgtaaagagactcagatcccactgaaattagacaatctaccaattcttcaaccagaaaaacctattgttctaaaagtgcacttaagagatgggattacaagtggaccctgactttccctaaggacttccactttgttcaagaaagctgtatcccagaacactagacacttcaaattgttttgtgaataaaactcagaaatgaagatgagcttaaaaaaaaaaaaaa

SEQ ID NO: 189 - DNA, 2194 bp, Homo sapiens
  CDS (89)..(1408)
atatcgtcgacccacgcgtccgcccacgcgtccgcccggctataagcgcacggcctcggcgaccctctccgacccggccgccgccgccatgcagccctccagccttctgccgctcgccctctgcctgctggctgcacccgcctccgcgctcgtcaggatcccgctgcacaagttcacgtccatccgccggaccatgtcggaggttgggggctctgtggaggacctgattgccaaaggccccgtctcaaagtactcccaggtggtgccagccgtgaccgaggggcccattcccgaggtgctcaagaactacatggacgctcagtactacggggagattggcatcgggacgcccccccagtgctgggcgcccattcccgaggtgctcaagaactacatggacgcccagtactacggggagattggcatcgggacgcccccccagtgcttcacagtcgtcttcgacacgggctcctccaacctgtgggtcccctccatccactgcaaactgctggacatcgcttgctggatccaccacaagtacaacagcgacaagtccagcacctacgtgaagaatggtacctcgtttgacatccactatggctcgggcagcctctccgggtacctgagccaggacaccgtgtcggtgccctgccagtcagcgtcgtcagcctctgccctgggcggtgtcaaagtggagaggcaggtctttggggaggccaccaagcagccaggcatcaccttcatcgcagccaagttcgatggcatcctgggcatggcctacccccgcatctccgtcaacaacgtgctgcccgtcttcgacaacctgatgcagcagaagctggtggaccagaacatcttctccttctacctgagcagggacccagatgcgcagcctgggggtgagctgatgctgggtggcacagactccaagtattacaagggttctctgtcctacctgaatgtcacccgcaaggcctactggcaggtccacctggaccaggtggaggtggccagcgggctgaccctgtgcaaggagggctgtgaggccattgtggacacaggcacttccctcatggtgggcccggtggatgaggtgcgcgagctgcagaaggccatcggggccgtgccgctgattcagggcgagtacatgatcccctgtgagaaggtgtccaccctgcccgcgatcacactgaagctgggaggcaaaggctacaagctgtccccagaggactacacgctcaaggtgtcgcaggccgggaagaccctctgcctgagcggcttcatgggcatggacatcccgccacccagcgggccactctggatcctgggcgacgtcttcatcggccgctactacactgtgtttgaccgtgacaacaacagggtgggcttcgccgaggctgcccgcctctagttcccaaggcgtccgcgcgccagcacagaaacagaggagagtcccagagcaggaggcccctggcccggcggcccctcccacacacacccacacactcgcccgcccactgtcctgggcgccctggaagccggcggcccaagcccgacttgctgttttgttctgtggttttcccctccctgggttcagaaatgctgcctgcctgtctgtctctccatctgtttggtgggggtagagctgatccagagcacagatctgtttcgtgcattggaagacccacccaaggcttggcagccgagctcgtgtatcctgggggctcccttcatctccagggagtccccctccccggcctacagcgcccgtgggctgagccctacgcaaacagggcgtcctcccgggcctccttggaaaactgcctggcttgaggccctctggccagcttgtgcccagatggctcttgacacctactgtcagggtccgggccgttgggattgagcggtagagctgaggatgctggaagacactaagggcaaaccaccggtggacccgcagggggacggaatgacaacgccgggcagtattgcgcagaaagagcagaaagaggaggatgaacaacacagcgaacacctgggtcacagtagggagaacacaccgagctgccacacatagccgagcaccaaaaaacaaacaagaacacaaacaaggagcaaaaacacacaaacaccacatcgacgacacacaaagcaaacaaataacggctaaaactgacacctattcgttagtaac

SEQ ID NO: 190 - DNA, 823 bp, Homo sapiens
  CDS (50)..(817)
gtcagtaattccctggtcgacgatttcgtgctggagaacgccacccaaaatgaagagagaaaggggagccctgtccagagcctccagggccctgcgccttgctccttttgtctaccttcttctgatccagacagaccccctggagggggtgaacatcaccagccccgtgcgcctgatccatggcaccgtggggaagtcggctctgctttctgtgcagtacagcagtaccagcagcgacaggcctgtagtgaagtggcagctgaagcgggacaagccagtgaccgtggtgcagtccattggcacagaggtcatcggcaccctgcggcctgactatcgagaccgtatccgactctttgaaaatggctccctgcttctcagcgacctgcagctggccgatgagggcacctatgaggtcgagatctccatcaccgacgacaccttcactggggagaagaccatcaaccttactgtagatgtgcccatttcgaggccacaggtgttggtggcttcaaccactgtgctggagctcagcgaggccttcaccttgaactgctcacatgagaatggcaccaagcccagctacacctggctgaaggatggcaagcccctcctcaatgactcgagaatgctcctgtcccccgaccaaaaggtgctcaccatcacccgcgtgctcatggaggatgacgacctggacagctgcgtggtggaaaaccccatcaaccagggccggaccctgccttgtaagatcaccgtatacaaaaaaagctccttttacataatttgtctcaaggaggcatcttcctcctttggaccttggtgaaga

SEQ ID NO: 191 - DNA, 3120 bp, Homo sapiens
  CDS (115)..(3063)
cggctccgcctgctgctgctggagagtgtttctggtttgctgcaacctcgaacggggtctgccgttgctccggtgcatcccccaaaccgctcggccccacatttgcccgggctcatgtgcctattgcggctgcatgggtcggtgggcggggcccagaacctttcagctcttggggcattggtgagtctcagtaatgcacgtctcagttccatcaaaactcggtttgagggcctgtgtctgctgtccctgctggtaggggagagccccacagagctattccagcagcactgtgtgtcttggcttcggagcattcagcaggtgttacagacccaggacccgcctgccacaatggagctggccgtggctgtcctgagggacctcctccgatatgcagcccagctgcctgcactgttccgggacatctccatgaaccacctccctggccttctcacctccctgctgggcctcaggccagagtgtgagcagtcagcattggaaggaatgaaggcttgtatgacctatttccctcgggcttgtggttctctcaaaggcaagctggcctcattttttctgtctagggtggatgccttgagccctcagctccaacagttggcctgtgagtgttattcccggctgccctctttaggggctggcttttcccaaggcctgaagcacaccgagagctgggagcaggagctacacagtctgctggcctcactgcacaccctgctgggggccctgtacgagggagcagagactgctcctgtgcagaatgaaggccctggggtggagatgctgctgtcctcagaagatggtgatgcccatgtccttctccagcttcggcagaggttttcgggactggcccgctgcctagggctcatgctcagctctgagtttggagctcccgtgtccgtccctgtgcaggaaatcctggatttcatctgccggaccctcagcgtcagtagcaagaatattagcttgcatggagatggtcccctgcggctgctgctgctgccctctatccaccttgaggccttggacctgctgtctgcactcatcctcgcgtgtggaagccggctcttgcgctttgggatcctgatcggccgcctgcttccccaggtcctcaattcctggagcatcggtagagattccctctctccaggccaggagaggccttacagcacggttcggaccaaggtgtatgcgatattagagctgtgggtgcaggtttgtggggcctcggcgggaatgcttcagggaggagcctctggagaggccctgctcacccacctgctcagcgacatctccccgccagctgatgcccttaagctgcgtagcccgcgggggagccctgatgggagtttgcagactgggaagcctagcgcccccaagaagctaaagctggatgtgggggaagctatggccccgccaagccacctcctcttgcctgtgccctgcaagccttctccctcggccagcgagaagatagccttgaggtctcctctttcttgctcagaagcactggtgacctgtgctgctctgacccacccccgggttcctcccctgcagcccatgggccccacctgccccacacctgctccagtccccctcctgaggccccatcgcccttcagggccccaccgttccatcctccgggccccatgccctcagtgggctccatgccctcagcaggccccatgcccttcagcaggccccatgccctcagcaggccctgtgccctcggagccctggacctccaccacagccaacctcctaggccttctgtccaggcctagtgtctgtcctccccggcttcttcctggccctgagaaccaccgggcaggctcaaatgaggaccccatccttgcccctagtgggactcccccacctactatacccccagatgaaacttttggggggagagtgcccagaccagcctttgtccactatgacaaggaggaggcatctgatgtggagatctccttggaaagtgactctgatgacagcgtggtgatcgtgcccgaggggcttccccccctgccacccccaccaccctcaggtgccacaccaccccctatagcccccactgggccaccaacagcctcccctcctgtgccagcgaaggaggagcctgaagaacttcctgcggccccagggcctctcccgccgcccccacctccgccgccgcctgttcctggtcctgtgaccctccctccaccccagttggtccctgaagggactcctggtgggggaggacccccagccctggaagaggatttgacagttattaatatcaacagcagtgatgaagaggaggaggaagaaggagaagaggaagaagaagaagaagaagaagaagaggaagaagaagaagaggaagaagaggaagaggaggaagactttgaggaagaggaagaggatgaagaggaatattttgaagaggaagaagaggaggaagaagagtttgaggaagaatttgaggaagaagaaggtgagttagaggaagaagaagaagaggaggatgaggaggaggaagaagaactggaagaggtggaagacctggagtttggcacagcaggaggggaggtagaagaaggtgcaccaccacccccaaccctgcctccagctctgcctccccctgagtctcccccaaaggtgcagccagaacccgaacccgaacccgggctgcttttggaagtggaggagccagggacggaggaggagcgtggggctgacacagctcccaccctggcccctgaagcgctcccctcccagggagaggtggagagggaaggggaaagccctgcggcagggccccctccccaggagcttgttgaagaagagccctctcctcccccaaccctgttggaagaggagactgaggatgggagtgacaaggtgcagcccccaccagagacacctgcagaagaagagatggagacagagacagaggccgaagctctccaggaaaaggagcaggatgacacagctgccatgctggccgacttcatcgattgtccccctgatgatgagaagccaccacctcccacagagcctgactcctagccatcttctgcaccccactctttgtttccaataaagttatgtccttagaaaaaa

SEQ ID NO: 192 - DNA, 903 bp, Homo sapiens
  CDS (310)..(780)
cgcccgtgttgtgtgtccccggtgtcaccgagcgtgttgtgtgtccgtgcggcgcggcgctgtgtggctccctcgcgcccaccacgctggcccccgggccccggctcgcccttcccaggcgccggctgcagcagagtttcagaacaagcttcctggaacccatgacccatgaagtcttgtcgacatttataccgtctgagggtagcagctcgaaagtagaagaagtggagtgttgccagggacggcagtatctctttgtgtgaccctggcggcttatgggacgttggcttcagacctttgtgatacaccatgctgcgtgggacgatgacggcgtggagaggaatgaggcctgaggtcacactggcttgcctcctcctagccacagcaggctgctttgctgacttgaacgaggtccctcaggtcaccgtccagcctgcgtccaccgtccagaagcccggaggcactgtgatcttgggctgcgtggtggaacctccaaggatgaatgtaacctggcgcctgaatggaaaggagctgaatggctcggatgatgctctgggtgtcctcatcacccacgggaccctcgtcatcactgcccttaacaaccacactgtgggacggtaccagtgtgtggcccggatgcctgcgggggctgtggccagcgtgccagccactgtgacactagccagtgagtctgctcctttgcctccctgccatggtgcggtccctcctcatctctcccaccctgaagcccccaccattcatgctgcctcttgttactcttagcataaaatgggccttaactgcagaaatgtcaaatcagaacagtagctgcctagtaatgcccagtgatgggggacccttgtgcccttggaaaacctcactccaagtagaggctgtatatgg

SEQ ID NO: 193 - DNA, 831 bp, Homo sapiens
  CDS (421)..(828)
ggccgcgttatttgtaggatggcgtccatttggtgtccaggaacaacttggagagaggcggggaggggacaggcagcagggccctggcagagccaggggagggctggcctttggatggccttctgatcccaagcccatcctcctggggcagtcttcccttgaaagggagggtttggtgaaccctggtgcggacccccccgccggacctcactgccccagtgcggggcgtggtaggcgggtttgcaatgggtacagcctctctctccattccagtagagcagctcccagggcccagagaggctgtcactgagacttccctctggggtggggtgggttctggtggccctgtgttcccctgcaggaggacctcctgaggcttcgggcaggagctggtgcacacctggaggagagtgctggtgaatggcaggtgtgtgcctcagtgtccttgctgccagggtgtcagccctgcttcaccactggccgtttgtctctgtcccctccactggcctcttgaaagcacagaagacccctccggggtactttcctttcctttgggcttcccactcatgctattccctgctccctttttctacctggagacccccattcctcctcctcctttgctgccctcacctccacctgggccctcccagctcccgggagatggctgaaccccactccccacccgctagtcatcctcttcagcggtcctcccaagctgtcctcagcatggcagcctccacagcccctgggtgtcacccccggtttcgtgttgcctcggactccagacctgcccctcccaggctggcccagatggatcctctacagtga

SEQ ID NO: 194 - DNA, 719 bp, Homo sapiens
  CDS (80)..(412)
gagcctcctaatgcagtcttctgcacagtcctggggactgactgactgaatcacacctctggggctgggggctgctgacatgtgtgcctttccttggctgcttcttctcctgctgctccaggagggcagccaaaggagactctggagatggtgtggatccgaggaagtggttgcggtccttcaggagtccatcagcctccccctggaaataccaccagatgaagaggttgagaacatcatctggtcctctcacaaaagtcttgccactgtggtgccagggaaagagggacatccagctaccatcatggtgaccaatccacactaccagggccaaatcctaactatgcttctgagaagccttcaacagccttctgcctcctggccaagggattgctcatcttcttgctcttggtaattctggccatgggactctgggtcatccgagtccagaaaagacacaaaatgccaaggatgaagaaactcatgagaaacagaatgaaattgaggaaggaggcaaagcctggctccagccctgcctgactgctccttgggaaccccagtcctgagcttggtttcttcccagcacccagagaatccttcctcagctctcttctttccaggggaaggaggtgctcaggggtgggtatccagagagccatacttctgagggaagactggctggcaataaagtcaaattaagtgaccacaaaaaaaaaaaa

SEQ ID NO: 195 - DNA, 464 bp, Homo sapiens
  CDS (118)..(390)
ctcctatagggaatttggcctcgaggcaagaattcggcacgaggctgagaaagattaagctgcaggctccctgcccataaaacagggtgtgaaaggattctcagcggctgccccaccatggctacctgggccctcctgctccttgcagccatgctcctgggcaacccaggccttgaggtcagtgtgagccccaagggcaagaacacttctggaagggagagtggatttggctgggccatctggatggaaggtctggtcttctctcgtctgagccctgagtactacgacctggcaagagcccacctgcgtgatgaggagaaatccttgccgtgcctggcccaagaggcgccccagggtgacctgttgaccaaaacaccagaacttggcccttgaattacaaggacctgttctgacgattagtccaaaaacttgaagaagatggtgggataaggccaacccagagt

SEQ ID NO: 196 - DNA, 4030 bp, Homo sapiens
  CDS (985)..(3036)
  misc_feature (1)...(4030): n = a,t,c or g
gtatgttctctcccgcgggtccgtgtgcaattcgtggtctcttcctcctgcagtctgttttctcctcgagaggtcatggcccctccaaaatctgtaagccctgaccttctgtcccggccccgccgttgtgggttggtcacctggtgtgatggggaacttcagttgcggcccagttaaccttgtgttgccggtgctccaggagccggtgaacagcacgccctgtgtatcggaatccgtggatgaagcncccagcaagattcccggtaagtcccaccgagtggctgcagtacccagggatgaccgaccccggcttcctttggattcgtagctagcttcgaatcacgcgggtacttcttgccgaacgcattttcccgagttaagtctgagggacttattgaagatgcgagaagtcaaacgcttccagcccacgggcagtcggacttaccacgctcatacgggcacgcgcactgtgcaaagttgtccacttgtcgtcctgggggagggtgcatggagtcaggcactctggcctggtgctggcttcttccaggaagaattctcggcgtgacatggccacgttgccatatgcgtgtccattcaagcgaatgtgccacgaatccagtcaaggtcaagacatcagacgcacgcccgatccagggacattgatgcttggtaaggtattccaagcatgacgcaattgttgattggcatcctgaagcgtcttcccaacgtatatgggtggccctagtacatgaccggagcccgggatgcggctgagcactattggataaagtttgtgacaccacaacgatgtttctctgcctgtctcaaaggccgagttcccacgacccaggatcagcacattctggcctacaaagtcctcagggtccacggacatcggacatcgtaaccctcctgctatatttcggagtccagggaagtcaacctggttggggatctgataaaccagaggctacaaagaggacgatgggcctctccgctgcggccccgttgtggggtcccccggggctgctcctggccatcgccctgcacccagcgctgtcggtgcccccgcgccgggactactgcgtgctgggcgctgggcccgcgggcctgcagatggcctacttcctgcagcgcgctggacgcgactacgcagtgttcgagcgggccccgcggcccggcagcttcttcacacgctacccgcggcaccgcaagctcatcagcatcaacaagcggtacacgggcaaggctaacgccgagttcaacctccgccacgactggaactctctgctcagccacgacccccggctgctcttcagacactactcgcgtgcctacttccccgacgcccgcgacatggtgcgctacctgggtgacttcgcggacacgctggggctccgtgtccagtacaacaccaccatcgcccacgtcactctggacaaggaccgacaggcctggaatggccactacttcatcctaactgaccagaagggccaggtgcatcagtgcagcgtcctccttgtagccactggtttatcagtccccaaccaggttgacttccctggctccgaatatgcagagggttacgagtccgtgtccgtggaccctgaggactttgtaggccagaatgtgctgatcctgggtcgtgggaactcggcctttgagacagcagagaacatcttgggtgtcacaaactttatccatatgctcagccgctcccgggtccgtctgtcctgggccacccactacgttggagacctcagagccatcaacaatggcctgctggatacctaccagctcaagtccctggacgggctgctcgagtctgacctgacggatctggccatcctgaaggacagcaaaggcaagttccatgtcaccccgaaattcttcctggaagaagccaacaccaaccagagtgccgactccatcaccctcccccaggacgacaatgacaactttgccatgcgcgtgccctatgaccgggtaatccgctgcctgggctggaactttgacttctccattttcaataagtccctcagacttaactcgggaaatgcattcggcaagaagtacccgctgattcgagctagctacgaatccaaaggaagccggggtctgtttatcctgggtactgccagccactcggtggactaccggaaatctgctgggggcttcatccacggattccgatacacagtgcgtgctgttcaccggctcctggagcaccgccaccacagcgtcacctggcccgccactgagctccccatcacacagctgaccagctccatcgtgcggcgcgtgaatgaggcttctgggctctaccagatgttcggtgtgctggccgatgtcatcctgttgaaggagaattccacggcctttgagtacctggaggagttccccatacagatgctggcccagctggagacactcacagggaggaaggcaaagcacgggctcttcgtcatcaacatggaatatggcagaaatttctctggccccgacaaggacgtcttctttgatgaccggtctgtggggcacacagaagatgcctggcagtctaactttcttcatcctgtcatctactactatagatacctccccaccgaacaggaggtgaggttccgccctgcacactggcccctgcctcggcccacggccatccatcacatcgtggaagacttcttaacagactggactgccccgatcgggcacatcctacctctgaggcgcttcctggagaactgtttggacaccgatttgcgaagcttctatgcagagtcctgcttcctgttcgccctcacgcgccagaagttgccacccttttgccagcaggggtacctgaggatgcagggactcgtgagtaccgagagcctttggcagcacagagtggagagcaggctcctgcgggactatgcccccacaggcaggcgcctggaggacagcagccagcagcttggcgaccaagagccactaggttcccccctggctccagggcctctggctcagtccgtcgatagcaacaaagaggagctctgactgtcccttcctaagctgtgggcacagtggccaggcctccccacctaggcccatggtcagtccctctttccccgcaacctcacactcccgccaatgcgtgattgccaaagaccactcagatcatggcagtgtctgcagcaaagccaccagatggcacgtgagggctgaaagtcggggatgcggtggtctcctccctcctgtcagggggccagaagggcatcctctgccaggtgggagctgccttccccagcccagtttgtctgcaatggagctgtcgctgagccccaggccagcccagttctgccccgtctcaagtgctcctcttccttccaagcccctcctcagatgggcctgcatcccgcctgtggagtgcttcacaggggaaacccatccgcatcttaagagtttgtggcaagcgctttaaaacaaaagctctgatatcctcaacaaccacaacgggcaggtgggattgttgccccagatgactgctgaagacaccagctgtgggatgtcaagtaattccagggacccccagctgggagtccccgtctgtgtcacttgccacacactgcctcaacctccccgccccattttcagcagggtttgggcttagctacagagcccaagagggtcagccctgcttatcatcataggcccagcaggctgatctcgagcagcgataggacagctccctgcaaagccatcttagcaactttctcactgagaagcaggattcagagctgctctccccagttgcaccccctgactcatcttccagctggctcttctctcccatcctactcccttctgtctccctgccctctgccatcctgaaccatgccttgcttctaacctgcctggtcaagttttgtgaaacttatcctgctgtctcgggctggcacccatatgtgctcaccatgtgtaaggtgacatttccaaatgcctttgtgtgataatgatgatgaatttggttcctaaaaaaaaaaaaaaa

SEQ ID NO: 197 - DNA, 2068 bp, Homo sapiens
  CDS (65)..(1339)
cctacatcagaatggtaacagggcccccgcgcggcagggccctggacccgcgcggctcccggggatggtgagcaaggcgctgctgcgcctcgtgtctgccgtcaaccgcaggaggatgaagctgctgctgggcatcgccttgctggcctacgtcgcctctgtttggggcaacttcgttaatatgagctttctactcaacaggtctatccaggaaaatggtgaactaaaaattgaaagcaagattgaagagatggttgaaccactaagagagaaaatcagagatttagaaaaaagctttacccagaaatacccaccagtaaagtttttatcagaaaaggatcggaaaagaattttgataacaggaggcgcagggttcgtgggctcccatctaactgacaaactcatgatggacggccacgaggtgaccgtggtggacaatttcttcacgggcaggaagagaaacgtggagcactggatcggacatgagaacttcgagttgattaaccacgacgtggtggagcccctctacatcgaggttgaccagatataccatctggcatctccagccccccctccaaactacatgtataatcctatcaagacattaaagaccaatacgattgggacattaaacatgttggggctggcaaaacgagtcggtgcccgtctgctcctggcctccacatcggaggtgtatggagatcctgaagtccaccctcaaagtgaggattactggggccacgtgaatccaataggacctcgggcctgctacgatgaaggcaaacgtgttgcagagaccatgtgctatgcctacatgaagcaggaaggcgtggaagtgcgagtggccagaatcttcaacacctttgggccacgcatgcacatgaacgatgggcgagtagtcagcaacttcatcctgcaggcgctccagggggagccactcacggtatacggatccgggtctcagacaagggcgttccagtacgtcagcgatctagtgaatggcctcgtggctctcatgaacagcaacgtcagcagcccggtcaacctggggaacccagaagaacacacaatcctagaatttgctcagttaattaaaaaccttgttggtagcggaagtgaaattcagtttctctccgaagcccaggatgacccacagaaaagaaaaccagacatcaaaaaagcaaagctgatgctggggtgggagcccgtggtcccgctggaggaaggtttaaacaaagcaattcactacttccgtaaagaactcgagtaccaggcaaataatcagtacatccccaaaccaaagcctgccagaataaagaaaggacggactcgccacagctgaactcctcacttttaggacacaagactaccattgtacacttgatgggatgtatttttggcttttttttgttgtcgtttaaagaaagactttaacaggtgtcatgaagaacaaactggaatttcattctgaagcttgctttaatgaaatggatgtgcctaaaagctcccctcaaaaaactgcagattttgccttgcactttttgaatctctctttttatgtaaaatagcgtagatgcatctctgcgtattttcaagtttttttatcttgctgtgagagcatatgttgtgactgtcgttgacagttttatttactggtttctttgtgaagctgaaaaggaacattaagcgggacaaaaaatgccgattttatttataaaagtgggtacttaataaatgagtcgttatactatgcaaaaaaaaaaatcctagcagtattgtcaggtggtggtgcgccggcattgattttagggcagataaaagaattctgtgtgagagctttatgtttctcttttaattcagagtttttccaaggtctacttttgagttgcaaacttgactttgaaatattcctgttggtcatgatcaaggatatttgaaatcactactgtgttttgctgcgtatctggggcgggggcaggttggggggcacaaagttaacatattcttggttaaccatggttaaatatgctattttaataaaatattgaaactcaaaaaaaaaaaaaaa

SEQ ID NO: 198 - DNA, 1732 bp, Homo sapiens
  CDS (263)..(1729)
tgaaacaactttccatgtaattgtctagctcctcccagtttggtcacagactacaactcttgcctgatttcatcagcttcatctgcacgaaaaagtcccggatatcccataaaagtccacaaatttaaggaggctcacatgcttttgtaagttttggtaacatctattccttgaattttcagtgacacagcaagaggtacaatttaaaccagaatccctctgtaagaagctgttctcagatcataaagaactggagggtttaatgaagaccctgatacatccttgttctcaggggattgtgatattttctagaagctgggctggtgatgttggcttcaggaaagaacagaatgtcctgtgtgatgctctcctgatagcagttaacagccccgtggtactctatacaatcttaatagaccccaattggcctggaggacttgaatatgcccgaaacacagctcatcagttaaagcagaaactgcaaactgttggtggttacacagggaaagtgtgcatcattccaaggctgatacacctgagcagcacacagagtagacctggtgagatccccctgcgttaccccaggtcctacaggcttgctgatgaggaggaaatggaagacttgctgcaggctctggtggtggtctccctgtcctccagatctcttctgagtgaccagatgggctgtgaatttttcaacttgctcataatggagcagagccagttgctttctgagagtcttcagaagacacgtgaattattcatctactgctttccaggagtcaggaagacagccctagccataaagatcatggagaaaattaaggacttgtttcactgcaaaccaaaagagatcctctatgtttgtgaaagcgactccctaaaggattttgtgacccaacaaactacctgccaagctgtgaccaggaaaactttcatgcaaggggagtttctaaagattaaacacatagtgatggatgagactgagaatttctgcagcaaatatggcaattggtacatgaaggctaagaacatcacccatccaaaggcgaaggggactggaagtgaaaaccttcaccatgggattctctggctttttcttgacccttttcaaatccatcacgcagatgtcaatggccttccccctccatctgctcagtttcctcgaaaaacaatcaccagtgggatccactgtgctctggaaatagcgaaggttatgaaagaagaaatgaagaggatcaaagaaaatcctccctccaacatgtctccagacacattagcattgttcagcgagactgcctatgaggaagcaacgtgtgcccaggctctgcctggggtgtgtgagacaaagactaatctgacaacagaacaaatagctaactatgtggcaagaaaatgtcacagcctgttccagtgtggctatctgcccaaagatatagcaattctgtgcaggagaggggaggacagaggacgctataggcttgcactactcaaagcaatggaattaattgagacccacagaccatcagaggttgtgtttagcccggccaccggtgtttggggaagtcacattgttttagacagtattcagcaattttcaggcctggagaggactgtcgtgtttgggcttagtccagaatgtgaccagtcagaggaatttcataagctctgctttgcttcaagagccattaaacacctctacctgctttatgaaaagagggcagcctactga

SEQ ID NO: 199 - DNA, 1753 bp, Homo sapiens
  CDS (191)..(1462)
cttctgtgttcggcgtgctttgctcggggaagctcaggtggccgccacagcctcttgccctctgacctgcaggtatcaggagatccatagctaagcagcctggacacccgggaagctgggaaatggtgtgatttgtccagataatctcacctgagaaggaatcccagagaagaaggaagaagaggaagaaatggctggttctcagggactgttgatattcagggatgtggccatagaattctctccggaggagtggagctatctggaccctgctcagcagaatctgtatagggacgtgatgttagaaaactacagaaacctggtctccctgggtattgctgtctctaagccagacctgatcacctgtctagagcaaaggaatgagccctggaatgtgaagaaacatgagacagtagccagacacccagctgtttcttctcatttcacccaagacctcttgccagagcatggtataaaagattcatttcaaaaagtgatactgagaagatatggaagctatggcattgagaatttacaattaaagaaagattgggaaagtgtgggtgaatctaaggtgcagaaagaatgttgtaatggacttaaccaatctttatcaactacacataccaaaatctttcaatttaataaatgtgtgaaagtctttagtaaatcgtcaaatctaaatagacataagataagacatactggagagatatcttccaactgtaaagaatgtgacaattccttttacatatcctcagttctaactccacttcagagaatccacactgcagagaaatcctacaagtgtaaacaatgtgggaaagcctttaggcactgctcatgctttcttgaacatgagacaattcataatgaagagaaacattacaaatgtaaagaatgtggaaaagtctttaaatccttcacaagcctttctaatcacattataattcatactggaaagaaactctataaatgtgaagaatgtggcaaagcttttaaccacagttcaaaccatgccaaacataagaaaattcacactggacagaaaccccataaatgtgaagaatgtggcaaagcctttaactggttctcatacctaactctacataaaagaattcatactggagagaaaccctacaaatgtgatgaatgtggcaaagcttttaaccagtgttcaaacctcactaaacataagagaattcatactggagagaaaccctacaaatgtgaagaatgtggcaaagcttttaaccggtgctcacaccttactgaacataaaagaattcatactggagagaagccctataaatgtgaagaatgtggtaaagtctttatatcttgttcaagcctttcaaaccataagagaattcatacaagagagaaatgctacaaatctgaagaatgtggcaaaacctttaaccactgctcagacctcaatgtacctgagaaaattcatacctgagaaaaatcctacaaatgtaaaaaatgtggcaaagcctttaatacctgctcatgtcttactcaggaccagagttcatattgaactaaagaattataaatataatgactgtcacaacacctttcacagaaaaaaataattttaccacagattaatttgttcattaatggaactttaattctgtggtttttttttttttttgggccaacataaatctgcccttaccccacaactatttggttaaattcctgcaacttggtagaaaaaattaatttcgggagcgtaagttcg

SEQ ID NO: 200 - DNA, 1606 bp, Homo sapiens
  CDS (763)..(1014)
cacaaaacttaaaacacagtattatttagcattcggatgtacatgaactaggatacttatgagaaacccaactgcgtcaaaagtatgacattgtggaaaaaatgaactcaaatatatcaaaatgcacaaagcactagtcttcctccattaccgcttagaaagatatgattgtttctccatttacaaaatagaatcaggacaatttaaattttttatattttgcatgcaaaacactgcaattgcttatttatgtaggagggcactctcaccagcttcttctatacacaattgagtatacaatattgcatggaagaaaacagcagctcaactgaaatattagaaaaaaaaatcaaacagatacatacagatttaaaatccagtacttgggaaaagatatcaatgaataaaaggcctacttgtttgcagcttccacacactgcacctacctactacctctcttccatgcttaactgggtttagaaaggtgagctatgcgtagaagaactacttgggatattcaagtgctgtatttgaacgataagcctatagataacagtctgaagctgcaagggagactttgttagtacactactataaacaggtaaactacctgtttgtacttgatatagtgcatatgaaatgactgatttaatacaaaactacagaacatgcaaaattttttctgagatgttaagtattacttcagtggagaacaaaacttacttaacctttcgctaatgcatgtagtaccagaaagcaaacatggttttagcttcctttactcaaaatatgaacattaagtgttgtgaatttgtctgccaagtggttcagaaatacattataaataacctagttaaaaaaagaaactgtgaaccatcttggtcagtctattctattctatgtttatatgttattttctcaagcaatcgcttcataattatagggtttacaaaaaggtcgagaaagaaaagcgaaggcgaaatagcctctactgcattacaagcaacatcaggataaactgtacaaagaatcacatggtttccataccatgaatgtagaaagcagaccaggtttaggaatgataggacaatgcactctctgcaatagccaactacaacaaaacactttgaaagtaaaggtgaaaattatataaagggaaaaattcaagcctttaaatagcattatgtcaagaggtgaaaacaaaggtatcaaaacaccctgttgcactacgttgatagttatagactgatagagtgccctccattttcaatgaggatgtctccatattttagttcagtgatgtaataaagtactgattactgatttttaacccaactcttaataggctgcattaagacagcaaaattagccaaatacaacaaagtatttaaaccactactttgtgattgttttcttggatgtagaaaaattacagggttaggctagttgtaagtgaaaaagccacaggattaaaaaaaggactcatggggaaaaatatacactcacacccacacacacttatacacccacccccccacatgccaaccaaccaaccaaccagaaaaagatcagtaaaacttgttattaaccagggtgactgttcgct

SEQ ID NO: 201 - DNA, 242 bp, Homo sapiens
  CDS (20)..(208)
tagctttaatgtgctgcacatgatactggcagccctagagttcatagatggacttttgggacccagcagttttgaaatgtgtttatggagtttaagaaatttattttccaggtgcagcccctgtctaactgaaatttctcttcaccttgtacacttgacagctgaaaaaaaacaacatgggagtaataatgggtcaaaatttgcaaaataaagtactgttttggtgtgggaaaaaaaaaaaa

SEQ ID NO: 202 - DNA, 768 bp, Homo sapiens
  CDS (473)..(658)
cggtgtcgacttactagctgcaagcctctgcctgccttcctgcgcgccgttccccgctagtcgctgctgctggcgcgcactcgccgggtttttcctcccacggcctcgagatggtggtgaatgtggcacggaggagccgggccttccaacccggtgggcccgagctccgaaaggccccctcggcagtgagaggggcgggagcccgcgggggccgcgcccttctctcgcttcggactgcgcaacgctgcgctctgggctgacaggcggataaaacggtcccatcaagactgagaaaaagcacaccagctattggcacagcgtgggcagtggggcctacaggatgactgacttagtctacagagatcccggcgtacttaagcaggtagtaatgatggacagatgaagactcttaagatgacagaaggtgatttttctggtgatcgaggacttccggggtaatgacagtgatgaaatgcaggggacctggttgcccccaagtttcctggcagtgtgtgatactgaggaggtgagcttgtttctggagctgtgctttaagattcatgttacatgtaaagctgtcctcatttgtgactatggacctatggagttgggacaatctctatgggaagcagaaggcaaggaccccggtcattttaggtagaaacaacagcatgctaatgcaaaaaattatgcagtgtgctactgaacttcagaggtgatcaataaaagaagaataaaaagactaataaaagtaaaaaaaaaaaaaaa

SEQ ID NO: 203 - DNA, 2168 bp, Homo sapiens
  CDS (398)..(1888)
tttttttggtgttggggcatttgaaaaaaaaccccccccccgttggggggggtttcttctctatacaaaaaaaaatgtgtggtgattttctacacgtgttatagtattcatatttataattttgttgtaagatattttatcaagctatactgttacttaatcctaaggggttttatcaaggtttataaaactgccttcagtgttcaggttggagaatctcctataaaagtttccttgctgtcttgcccaatatacagttaataaaagaaatacatgtaaatgcttttaatttaatggtatattcccttatatttttaaagcagtttcatcctcaagaagagcatttaagataatgtgaattttagcaaaatttgtctcacttttagatactatttgtatgtattattgctgtatctatttgaactcagcagttaaccacatttctctctctgttttgaagctaaatgttgccagctacctacaaatgatttgcttaactgagaattttagaactgatgtaaaagactttgtaaccttgttaactgcaaatacttgtgatatcagaaaaagtatcctttacttacaattctggattagaagtggaggtggagttttagaagaacgaccattaaccctttatcgtggaaatagcagaaatgtacaactagtttgctctgaacatggccttgataacaaaatttaccctaaaaatactaaaaagaaacgtgtagaccttccaaaatgtgacagtggctgtgctgagaccttgtttggccttaagaacattttttccccatctgaagacttattttcatttttaaagcacaaaatcacaatgaaggaagaatggcataaattcatccagcttcttacagaattccaaatgcggaatgtagattttttatatagtaatcttgagtttattctaccattaccagttgataccattccagaaactaaaaacttttgtggcccatcagtaactgtggatgccagtgcagcaacaaaaagtatgaattgtcttgctaggaaacactctgaaagagaacagccattgaaaaagtcccagaaaaagaaacaaaagaaaacattggtaatattagatgatagtgatctatttgacactgacttggactttcctgatcaatctattagcctgtcctctgtatcatcttcctcaaatgcagaagaaagcaaaaccggagacgaagaaagcaaagccagagacaaaggaaacaatccagagacaaagaaatctattccttgtcctcctaaaacaactgcaggaaaaaaatgttctgcccttgtttctcattgtttaaattctctctctgagttcatggataacatgtccttcttagatgcacttttaactgatgtaagggaacaaaacaaatacggtagaaatgactttagttggacaaatggaaaggttacaagtggactttgtgatgagtttagtcttgagagtaatgatggatggacttctcaaagctctggagaattaaaggcagctgcagaagctctcagctttactaaatgttcttctgctatttcaaaagcattggaaaccttgaattcttgcaagaaattaggaagagatccaaccaacgatcttactttttatgtttcacaaaagcgcaataatgtatactttagtcagtcagcagctaatttagacaatgcttggaagaggatatcagtcattaaaagtgtattttcgagtcgatctcttctctatgtgggtaatagacaagctagtataattgaatacctgccaacccttcgaaacatctgtaagactgagaagctaaaagaacaaggaaaaagtaaaagaagattcctgcactatttgaaggaattcatcttgacattccaaaagagactgtgaatactttggcagctgacttcccttaatgttccatactaacaatgcttgtatagattatcatgtggtccttaagatacatttttatattatgtggatcttcatggaaaagtatattctcgatgtacattttaaacaaacaaattggtatatttttttatgggcgggtaaatattttaaaaatattgaggttacaaacttttatatattgatggtaatcttttctgaatttctgattatctgaattaagcttgtggagtaattttggattgtgagtgaa

SEQ ID NO: 204 - DNA, 2121 bp, Homo sapiens
  CDS (817)..(1206)
gatcttggagaccacatttagatggaaatgagaggacctccacagccccgcctccctgccaggatgctagattatggctgggaggtgggcaagtggcagcccagctgaagcaagaggctggattgactggctgctcactcagggcaggtggcctgccctggcatcctgtagattctgagcaggttgagatgtggatatctccatgggaagcttgaaccaggctagaacagctgtctgccaaagatacaagaatatgcaaagtccctcttacccccctccttccctcaagtcttagttggtttgagagccagggatatggatccagggtgctgttgcagggtcacctgcctgttaccacacccccatccagctgggtggtgggtgagggtgtgagacaggcagggagaccaggtaatgagtggctgcaaggagtcatatagcctgggtgtgggtgagggtctgcctgcctgtttctgtctgggtgtctgagttccaaaaaatgtgtgttgtttgttcctcctcatcctcttctgagactgttgtttttttagagcttgattgtgggagaaaagcttgtgtgaaattccctcttcacctccccaccccccaaaaaataaaagggggcataaactttattccactggagaagccctgggggtggctggagccagcctgctgagaagcgtggtgcagctgggtctgggacttcactagagcttactctggagcacctattttctgtgcacatgggagtgctccactccctagcagagcagagggaagtctctgccaggtacccacgccacaggcctcaggatggctttttgtctgagggcctcattaggcccagactgctgctgctggtaccagtctcctgagacactgcctccctggagcccatgcatgcccagctgttcttactgcttagtagccttgaagcagcacatctccactgtccctggcaggattgtgggaggcttcacaacccctgctttcctgacttcctcttctgcccaacactgggtgccccttcccagtttcccagcaggggcttcatgggccaccgtcagtgggtctgggcctgccagagtcgtcttgctcttcctcttgcttctaggcaaccacacttggcaagttaaatgtcccaagcaccttgtctcccttcccaagaacaaaccatttctgtgcacatccttggaggcgagatgagctccttgcagagggccagagtaagtgcaagtcatggagtgcaggcagaggggtccatggcttcccccagcccaggggagggtatcagtatcattcattctctctcccctcactgggtatgggttcagagcaatgcctagggcccctctctgctcccctgcctagtggggtggtagtggctacgctctcagccccaatagtccctgctcctcttagaatcttcaccaagtggcaggccacctctggggcaggaccacctgcgtctggcacccaggaggtgaggcagacaccatggttagggtgatagggtctgaacccagttgggggagacagaggggttcagacttgggaagaatctgtcagtgtgcatggagtgaggtgtgtgtgtgtggatggcctgtgcaccgtgtgccatgcttttttttctttttgccgtgaggacacgttgaatttggggccttttctacaagaagccagtcagccttctctcccccataggactggtgtaaccttaagcccatcaaagttacttccaggctggagagaacctcaccaaacagctggtgtggcctgagggtggccatggtgggaaatgggcatgagaataaatacctccccaaattcaatctgagcccagcaggagaggatggtagggttgccagggctcagaagtgcaagctgattactcaccccaccctgcctcgccgcacctttcctttgtttccttgggtgaatgcaggagcagcagtggctgcccttcccacctggacagtggtgtgtgtagaaagccagctggatgtttgtggtggggcctcatggtgcctaggaggagataaagatgaggaggtttttccttattgtataaatgaatatttgtatgattaaattaacacacacaccaaaaaaaaaaaa

SEQ ID NO: 205 - DNA, 1193 bp, Homo sapiens
  CDS (431)..(1159)
ccacctggactctgtccgtgtctgtcccccggcctccaggctcctctcccgggacccccgtcccacgcctgggccccgcgccgggggaagcgcctgctgcctatctctgtctacctcaggtctgacttttgatgccaaaatctgagcccctggggtgcctctcccccgcctcccgtgcaccaggtctgcagcagccactggggcctggctgcctgctgcatctggcggcctggacccctggggcccccgtgcacctgcccacctcggagcctggggaggggctgtgcagggtcgagggctgggtcgtctccctcgggctgcgtgtgcgtgtcgggaatcctgcgtgtcgtgtctgtgggcgatccggcctcccggcggtgggttggacctggattctaactcagaggacttgagcctgctgttaactccgatgattgtagggacaggcggggtgggtggtggggtgggctgcgaggctgggtcccggcccaggagaaggaagtcgctgaaggcagtggccatgctggccgtggaaatgggaggcggttgcagggggtctatggggcccggtcctggatactcggcaggaagccgtgtctgcagaggctcctccctgcctcaggtggccccgttcaaccccagccgtgcccatctcctgccaccgcctgtcggtgggggtttaaattcggtgtggctttctggggtgcagctcagcacccccccttatgcagactgggagggggtcgggcagtcccctcagccacgaggaccctggatgggttctagttcacttgggaccgtggggcctggctgcgtactgagtgggtgccccacagtcaaggccaacgggggctccccctgctctgagatgttgggagaaaggcggcttctggaaccttccgtgggacccgtaagtggctgtccagaaaggcgggagggtgggcacggggcacggggggcagctggggtcgttgttaagggtcacgcatctgtacagttgaatttcctttctcttatcatgttttacccaccttgtcccttttttccccaattgtgcttttgcatttttttccttggcaaatgtaaactcagcctttcattcatgacgtgtgaaatttcagtttctctggagtttgtcagacggcgtgggaaccacgcctgaaactcaggtaataggaggaaaaaaaaaaaaa

SEQ ID NO: 206 - DNA, 3193 bp, Homo sapiens
  CDS (425)..(2308)
gcgattgcagggagaaactgttttcgcagcagtgcgcctcccttttccagccaccggttctcctgaccccgagtgtggggggtgacttcagtctcctgacatccagtgttctctcgagccagtttccagcccacagaaaatgagctcttccggaagtgggcatcttattccaatcccctccctgtgaatgtgtggagaaaaagagatgggaacgaggcagaggaaatagagaaattttgaaagagaaatgaagaatgagagacccattaacagaaggcaaagtagaaggttcacaaattttaagaaagggagaataaagtgaaaaaaatctcagaaggaatccactcaacagacgaggattcacttccaaagagacatattatgcaaggaagcaacttggaagaggaaagaaaagaagtcaggaatggcccttactcagggacccttgaaattcatggatgtggccatagagttctctcaggaagagtggaaatgcctggaccctgcgcagaggactttatacagggacgtgatgttggagaattataggaacctggtctccctgggaatctgtcttcctgacctgagtgttacctccatgttagagcaaaagagagatccctggactctgcagagtgaagagaaaatagcaaacgatccagacggcagggagtgcatcaaaggtgtgaacacagagaggagctctaaattgggaagtaatgcaggaaacaagccttgtaaaaatcaacttggattcacttttcagttacatctgagtgatctacagctatttcaagctgaaaggaaaatttctgggtgtaagcattttgaaaaacccgtcagtgacaattcctcagtttcaccgcttgaaaaaatttcttccagtgtcaaatcccaccttttaaataaatatagaaataattttgatcatgctccattacttccacaagaacagaaagcacacattagggaaaaagcttataaatgtaatgagcacggccaagtctttagagcatctgcaagccttactaaccaagtaatccataacgcagataatccttacaaatgcagtgaatgtggcaaggtctttagttgcagttcaaagcttgtgatacatcgaagaatgcatactggagagaagccttacaaatgtcatgaatgtggcaagctcttcagtagcaattcaaacctttcacaacatcaaagaattcatactggagagaagccttacaaatgtcatgaatgtgacaaggtctttcgaagcagttcaaagcttgcacaacatcaaagaattcatactggagagaagccttacaaatgtcatgaatgtgacaaggtcttcaatcaaattgcacaccttgtacgacatcaaaaaattcatactggagagaaaccttacagttgtaataaatgtggcaaggtctttagtcgccattcatatctagcagaacatcaaacggttcatactggtgagaaaccttacaaatgtgaagaatgtggcaaagcattttcagtgcgttccagcctcataacccatcagttaattcacactggaaggaaaccttacaaatgtaaagaatgtgacaaggtctttgggcgcaagtgtttcctgacctctcatcagagaattcatactagagagagaccttatggatgcagtcagtgtggcaagatctttagtcagaaatcagaccttatacgacatcgaaaaactcatactgatgagaagccttacaaatgtaataaatgtggcacagcgtttagagagttttcagaccttactgcccattttctaatccatagtggagagaaaccttatgaatgtaaagaatgtggcaaagtcttcaggtacaagtcttctctaaccagtcatcatagaattcatactggagagaagccttacaaatgtaacagatgtggcaaggtcttcagtcgcagttcaaacctggtatgccatcagaaaattcatacaggagaaaagccttacaaatgtaatcaatgtggcaaggtctttaatcaagcatcataccttacaagacatcaaataattcatactggagagaggccttacagatgtagtaaatgtggcaaagcatttcgagggtgttcaggccttactgcccatcttgcaatccatactgaaaagaaatctcatgagtgtaaagaatgtggcaagatcttcactcagaagtcttccctcaccaatcaccatagaattcacattggagagaaaccttacaaatgcaccctgtgcagtaaggtcttcagtcacaattctgaccttgcacagcatcagagagttcattcatgagagtccctacaaactgtgtatggcaaaaccatcatcatgagttctagcattaatcaacatcagtgagtccatactaagtggaaatcatataaatgaaatgtatgtgacacaggctttatcaaggcctgccaaatcactggacatcaccacatcactgtggaggatgaaagcacacagatgaattgtgtgtacttgggctattattcaaggaccattgctatagaacacgataggatttacacaagaagtaactctgtctctggttctctgatactaatctatgatattgcatgatgcagaataatgctaagtcaaaatatgttgaatctcatgacctgatgtatatcaaaggtgcaacggcttgtaaatgaccagttttattcaggctataaagcattcaattatttggggcttatagaaaaggctactttactctttgtgacttcgaaatcttttcatgtgccttccatacaggccattcactgtggtccctgggaaagaatcagtaggatgacagggctgacttcattagctgaggattatttctatccaatttcctgatgaaggacattgccttttgagattaaatattgtctgatttagagagcatggaggtgggcagagtaacataaaactgatgaccgtcatcatactgttgcagttagcacactttctcctgacataagtgcacagagcttcagtgtccaccaactgaccatgaaatagagtatgctgtaatcttaaggcataggttattagtgggaagagagtaataggttgctagtgtctgattatatggtagaaataatgcaaggaaaaaggtagccaccttctccattgaacagcagtacctgctgtttagcaaagactgatgagaagtag

SEQ ID NO: 207 - DNA, 2479 bp, Homo sapiens
  CDS (832)..(1098)
tgtgaagattctattaatcactgtttcagagaaccattaattcttgtatagaataattatgtactaaatggcttattatctgtgactaccttgcagagaacatactcaagcagtgcagtaaaatagctctcctagacttgagcttccagccaggcatttagatcactcttaagcctttgtggaattctgaggaaaaaaagcaagatgcctcaatgccaatgctgggccataagattctactcccctccctgtagggtggggcgcgtggctcagctttggaaaatcattttgccagtaatattgcctgtgaatccctttaagaagtcgtcctgatctgagcctgtctttctgagcactttggtgctgaattgaaaatggtaagctaaagcagtgacagatccacgtagcctctttaacctctttattatcttgccaaaaaaaaagtttctcaggttaaacctttgtctttaacctccctttgttgtggagaaaatgtgtcactaatcagtggtccaagggatatctagctttggttactcagttcctgcagcataacagatatgacttatgccagggaaggtagaggctgattatggagacacccaggaacaggaataagaagggataggtctgctccacgtagaacctccccagatcggaagttaagtcttggagagtttccaaagtgctgaagtaaaaaggagacttggagggcctttgcttaatgagcaagaggcttgtgtcctcccaagaacatgagggagttcagaagggagctatagctcacagacagaaacctgcccgctcaccccatccctcgtgactgggagcatgtttgctcagaattttctaagaggactctcccttcaaaaatccaatttgctcccagaatgttgtttagcctctgagaatctcactctttcatttccatctgtgaatggacatagatgtgttgctcagggatcagaaacatcagagtccagggcccagtggcatggtgttgcattagtagttagaaaagtaattggtcagctctactgtaaaagaaataagtatgtagtacagttttgtaaatgtcaggtctgttctattgttttgtgatctgaagactgtcaaactggttgataatcaaagaaaaggttggttagaataagtaaaatttcagttagaaagatatagcttaccagttttccatgtgcttaaggaagtcaagaatatttcaggttgttgagaactgttgtaaaatggaattgaagctagtgtctctcaccttcttaggtgtatcagagagaggaagtggaaggccagtagtagcatcttcatacttacttttgccagcccagcctccatttcaaagactttgtcttccatcctatccaatgacatggtcagggatgggctctgaggaggcagtgaggccccaccttggtttgctccactgtggtgtgtagtctccaaacagcttaagggtttttaagttttctcacgattacctccactccactcatctactatcagcatcagaaaggttaacatccctgggaccattctacttataaaagagatgaactagtgtgctttctccccttttccaggtgtgccatccatatacaatctcctcttggccaagttcaacaaatgtttccagggaaccccgtgggttgaggcaaagtagccaagatgtattgagttaagtttttctagaggacaaaagtatttcttgtcccttttccctcatgctcatatgttttagctgaggcgtaaatggccaagttgagtaatatctgtggaactgagacagagagccagggacccatgtacccagggaccagtcccctggggaatcacacagtggctcagactagactgctctatcccaccagaactctgctgctgttcatttccatcaggaccacccaggaaagcaaataagttagccttctcatcattaggtcacctaatctcttgggttgcaggatgagagcatatatagatctcctgtttagagagtgtgttcataattgtagaaagggatagaaaatggaataaccaagaggctgtgtcattttttaagaggatggcaaggatgacctcaaatgagctcaacaaaactgggaatccaaggaatggtgcttgtagggaaagagaggtcagttgtggtccttaaacctcttggcaccttgtgcgggttataaaacaaggagctggagtaaaattgcccttacccccaatccaaatgctgtccaggatttaggagctacccaacctgtggttatatggtgttggtttccattttttgtttgtttgcttgtttccaaaatagccttgcttggtactgcatggaaagttcaagcttttcttcttgcccgctcagggctggcctcttccccgtgtcttcacagcgtccctaaggaagatttttgcagcactctctggagctgaggggagtgaaatttggtccagagaaggcggaaggaaa

SEQ ID NO: 208 - DNA, 849 bp, Homo sapiens
  CDS (495)..(719)
cttttgctccattcagcacaaacacaaagcaaagcaaaaaaaaaaatatatatatatatatctgtatatgggtggtgtaggcaaaacactgtgaatttcacaacaaccaccaccaagcaactattttgccatcttaacatacatctcaggaaacaaaatgagaaaagatggggatgtcattttttagtctatgcgtttgaggccaggcccatgtttatttatttctttagtctatgcattaatgaaaatgatcctgagtggaggttagctgaacgttcaatgtactggagcaagcatcataaaagctgctagtagccatgtgtttgaacaggaaaaatattacagaaaatgaaatgtaaaggcctatatcttgcagcttgtatatcttactattgcttaaaaaatgtataaagcagctggaaatgttttaaatacaaggtctttgaattaaatgtggattttaaatatgtaatcccttgacaaatgaccaaattatggtgaactattgctccctgcgttctttgatcattacctatgacttacaaatctgcctggagatgtggacattctgcatttgcttctgtatctggagagatgtttgtatatatccaggccgtatacacacacatttccatatctctctacagatatatttccccttcaatcgtgacctggtatttggaactctccttttcatttggcttatcttccttttaatgtgatgtctctgtgctaatacttaccagttcttgttttgcaatctgttttgaggtccattgctttactaagacccactgcatcttggctgatttcaaagtgacacctgaatacagtgtttaaaaaaaaaaa

SEQ ID NO: 209 - DNA, 376 bp, Homo sapiens
  CDS (58)..(336)
caggaggaggatgagcagaatgatggcggtggtatttatcaaacttggccctgaaggatgccgctagcgtctcccatccagcaccatgaagtcaccaggggtgtggctccctccatggctctcagagatggcgtatgcagaatcccactttctgccgagtttacagctcagtgcactgattcccaggctcctcaaatgaagagagctcccagatgctgctgtcttgcagtagtggctcaatgtcctcatcactgccccgttctggggtgttggtcaggctgccgctgctgctgttactgtgtttttgaactccactggctttactgtattcaggaatgaataaggcaaccaccaaagccataaggactatacatgc

SEQ ID NO: 210 - DNA, 508 bp, Homo sapiens
  CDS (59)..(331)
cccacgcgtccgcgacgggctccgggccctgatagatggggtgcggggacggagacaaatgacggcctttgggctcggaatacccacctttctggtaatgcagcccagcgggtcccagcctcgttttccagccctcactcaaaatggagtcgctctggttcgaacgcctctgacaagtgtgtacctacgtgtcaggcccatccttcctgcaggcctttgtcttggtgtcaccctgcctgagctggccccaaccacagtagcaacagtgatgctgatgtgtgactgctgccaggagcctgctcacatgaccgtgtggagaaagttctttccctgaggaccatctggagtggacgcgtgcactacccctctctgaatacaccctccccacgaggccctctggagcatcctgtagagccagcccctacccagagaccctgagcccagagaatgcgctgggggggtgagctggggacgaatgcagagccctaggtcctcctctccagaaaga

SEQ ID NO: 211 - DNA, 1104 bp, Homo sapiens
  CDS (137)..(919)
tgccgctaggagtccacgggccgtccggggccccccccaggcctggcgggaccaggatgctgccctgtcacctgccccccagccccacacaacgcccccacccacccgaacatccagtctgactggagacagccggatgccctctgaccccgggcccgaggcgggcagtggctggccgggcctcctcatgtcctgcctgaagggtccccatgtcatcctcaagatggaggccatgaagattgtccaccctgaaaagttccctgagctaccggctgccccctgcttcccgcctgctccccggcccaccccaactctggcacccaagcgtgcctggccctcagacacagagatcattgtcaaccaggcctgtgggggggacatgcctgccttggaaggggcaccccataccccgccactgccacggcggccccgtaagggaagctcggagctgggctttccccgcgtggccccagaggatgaggtcattgtgaatcagtacgtgattcggcctggcccctcggcctcggcggcttcttcggcggcggcaggcgagcccctggagtgccccacctgtgggcactcctacaatgtcacccagcggaggccccgcgtgctgtcctgcctgcactctgtgtgtgagcagtgcctgcagattctctacgagtcctgccccaagtacaagttcatctcctgccccacctgccgccgtgagactgtgctcttcaccgactacggcctggccgcgctggctgtcaacacgtccatcctgagccgcctgccgcctgaggcgctgacggccccatccgggggtcagtggggggctgagcccgagggcagctgctaccagaccttccggcagtactgtggggccgcgtgcacctgccacgtgcggaacccactgtccgcctgctccatcatgtagtagcgcctgcctgcccgccactgcccgctgagcctcgctcgctgcttcttcagggacccggccctgccctgccgcccgctgacccttccttccccaccatggcttccggccccaccccgagtggcattgtcgctgcagccaactttgccattaaaactctttgccaaagttaaaaaaaaaaa

SEQ ID NO: 212 - DNA, 1631 bp, Homo sapiens
  CDS (250)..(1539)
cgcttgtgtcttgtgagaagagccgcgcttgcagcgtctgggagaatctttcggtctccgcgagaggtgcttcattccacgaaaaaagtataattcaagctcagatttgtgttgaaaccagcctcaagtttcacctatcctcactgatccgtggacttctgtatgatcagggtgctgtcctgagagcgctgcgggataaaggaggagcgtcctgcttcccggctgccctgttgctgtcggagtcacaggatggcggctgtcgtcctgcccccaactgccgctctgtcttccctgttcccagcctctcagcgagaaggacacacagagggcggagagctggttaatgagctcctgaaaagctggctaaagggcttggtgacctttgaggatgtggccgtggagttcacccaggaggagtgggcattgctggaccctgcccaaaggacactgtacagggacgtgatgctggagaactgcaggaacctggcctcactggggaaccaagttgataaacctaggctgatctcccagctggagcaagaagataaagtgatgacagaagagagaggaattctctcaggtacctgtccagatgtggagaatccatttaaagccaaagggttaactcctaagctgcatgtttttcgaaaagaacaatctagaaatatgaaaatggagaggaatcatcttggagcaacactcaacgaatgtaatcagtgttttaaagtcttcagcacaaaatcttcccttacacggcacaggaagattcatactggagaaagaccctatggctgcagtgaatgtgggaaatcctacagcagtagatcttaccttgctgttcataagagaatccacaatggggagaaaccctatgaatgcaatgactgtgggaaaaccttcagcagcagatcttaccttactgttcataagagaatccacaatggggagaaaccctacgaatgcagtgactgtgggaaaaccttcagcaattcctcatacctcagaccgcacttgagaattcacactggagaaaaaccgtacaaatgtaaccagtgttttcgtgagttccgcactcagtcaatcttcacaaggcacaagagagttcatacgggggagggtcattatgtatgtaatcagtgtggaaaggctttcggcacgaggtcatctctttcttcgcactatagcattcatacaggggagtacccttacgaatgccacgattgtgggagaaccttcaggaggaggtcgaatctgacacagcacataagaactcatactggagaaaaaccctacacatgtaatgagtgtgggaaatcctttaccaatagcttttctcttacaattcacaggagaatacataatggagagaaatcctatgagtgcagtgattgtggaaaatcctttaatgttctctcatccgttaagaaacacatgagaactcacactggaaaaaaaccctatgaatgtaattattgcgggaaatccttcacaagtaactcctacctttctgtgcatacgagaatgcataataggcaaatgtgaattcaataactgtgggaaaagcattcattgatctttcatgcctcagataacatgagcaaactctaacaagatgtatgaatcacctgcta

SEQ ID NO: 213 - DNA, 1494 bp, Homo sapiens
  CDS (461)..(628)
gaattttatatcaataaaataaaatactttctctagttttggagcttctgtatttcctatagttttctgactgtccattttatccatcttagaagtattcacatcccttctatgcaggatttctgcatagttttaaatactttcattgcctaagggtttgggtgtgtcagctttttttgttttaaaaatatttaacactaaaaccttaaaataatgaagctacttatcagaccactgagccaagatcctggtattaaaagaaagtctgggtgcttaagataaagggacagagtattggtatcccagttatttgggagctttaagattggaacaagatatcactgtcttgttttcacttagatcctacttacaaagtgagggttattaacagaataaagccttcctttaaagctttataataatcatatttattaataatgctgttgtgcatacttatagtatgcatatattcagcatatgttgcatgtcttcagaattacataaaatgaaatccctttcattgcaacttgcaagtgagaaaagatccttagtggctctggtggaagaaatagtatttcttcttctcagggtgtctccctgccttggcccctccctgagccccaggctttaaaagtgaaaatgtttgaaacatgaaacatgtctgtaggaagcatcagcatggccataagtgcagtgattttcatatatgcctctgcccatttcaaatatatttttgacatgaataaatctaacagtatacagaataattcatgtaagaccctaacgtgtacatgtgaaaaagcatttctatataatgtgaggagcactggccatcaattagggaaataaaggtcatgtaatattgcaaattttcaaaatagagccctgcaagataactgcaatcataccaaaaactatttgagtaaatggatttttaaagtaatttttgtttagaagagtttatatttcagaagcagaaaatgtcaaatgatagtctttgtaaatggtggtgcaccttctctatgcacatctgtcttttacatcagaaagagctgtggtcatgctaaaattagagataactttttgaatgacttggtcaagctgtgtgtaaaatatttaaccataagtcaagtacagtgtactatgtttaataaagttacatttaatgcatttattgcatatatgaatatatacatgaagaggctttatgtcttctggtatttgattttgaatgttttttaagtcagtggtgcctttaggcaagaactttcgaaattaatcattctttgtgttttctgatttttcaggtaacatgtacactatttagaaaccatcatagtttattcaccttaaaaaattgattgtattatttaaatatatcacttagatgggcatttcctataattaggatattccaaatagttgctgaaatcaattgtgccattgaccaatggatgcacttggttagccttaattttttttaaaaaaaaaaaa

SEQ ID NO: 214 - DNA, 1059 bp, Homo sapiens
  CDS (470)..(754)
tcgagagcacagagcaggtggtgaatgatggacggggtagaactggggggcagagagaggacacacactgagcacctgggcttggaccatggtgacctgggacctactctgtatttccttacccaacccgactaccttatcctttgatcaggacataatcaaaaactgctacatattcttcagagaattactgtgacgggctataatgtggggttgattattgacattacatggcttccaagttttaaaataacctaagttttgtgtagtggcaaacaggttctagggctacctctaaaacttactagctagtatggtttacagcaattagttttcacagcgataaagggatcagtcactaaccctcctaggaaatatcgactgtgaaagcgccagatactgaagcagtatataaatattaaattagaatattttgcatgccatatagtttcaagttgccttgaaatgaatgggttcacttttatgttcctgttcacagcgcgagtgtatctctatccacgtggggcaggcgggtgtccagatcggcaatgcctgctgggaactgtactgccttgaacatggaattcagcccgatggccaaatgccaagtgataaaaccattggtggcggggacgactccttcaacacgttcttcagtgagactggagctggcaagcacgtgcccagagcagtgtttgtggacctggagcccactgtggtcggtaggtgcctgggcactggatggcagctttcctgagagggtgggagagcattggtaaagccccgtgtgggctcctttgaatcctcctgctgaaaggatgggatagacaggcatatgcccatggcattgttaggagagaaactgaaaggttcgtgatcaaagtgtctgtgagactcggctcctaatttaggaaaacctgacctacagggaaaagctgctttgccagcagtaagatgggctgtgaagagattccctcgtgcgtgcctcagccctgctcaggtggccctgcctgcagggtgcagtggcattggttccctcccgaatgctgtgcattctct

SEQ ID NO: 215 - DNA, 463 bp, Homo sapiens
  CDS (258)..(425)
  misc_feature (1)...(463): n = a,t,c or g
atcgcaccgcctgcaggaattcggcacgagtggtcctggaactcaggggcctgcgcaccattgtgaccacgctgcaggacagcatccgcaaagtgactgaagagaacaaagagttggccaatgagctgaggcggcctcccctatgctatcacaacggagttcagtacagaaataacgaggaatggactgttgatagctgcactgagtgtcactgtcagaactcagttaccatctgcaaaaaggtgtcctgccccatcatgccctgctccaatgccacagttcctgatggagaatgctgtcctcgctgttggcctagatgtgattgtagccgtggtgcctgggcagatggtaaacaaacatgctgtcctcttatgacaatatgtgcagagaaggccccaaacgctggggtgagaggaacaacaaactgactaactcacggncgagttggagccagaaccaacaa

SEQ ID NO: 216 - DNA, 1055 bp, Homo sapiens
  CDS (86)..(523)
ggacctgggaaggagcataggacagggcaaggcgggataaggaggggcaccacagcccttaaggcacgagggaacctcactgcgcatgctcctttggtgcccacctcagtgcgcatgttcactgggcgtcttcccatcggccccttcgccagtgtggggaacgcggcggagctgtgagccggcgactcgggtccctgaggtctggattctttctccgctactgagacacggcggacacacacaaacacagaaccacacagccagtcccaggagcccagtaatggagagccccaaaaagaagaaccagcagctgaaagtcgggatcctacacctgggcagcagacagaagaagatcaggatacagctgagatcccagtgcgcgacatggaaggtgatctgcaagagctgcatcagtcaaacaccggggataaatctggatttgggttccggcgtcaaggtgaagataatacctaaagaggaacactgtaaaatgccagaagcaggtgaagagcaaccacaagtttaaatgaagacaagctgaaacaacgcaagctggttttatattagatatttgacttaaactatctcaataaagttttgcagctttcaccaaagaagtcttgctcatctttggttcacttccttcccagacacacacaaacacagaaccacacagccagtcccaggagcccagtaatggagagccccaaaaagaagaaccagcagctgaaagtcgggatcctacacctgggcagcagacagaagaagatcaggatacagctgagatcccaggtgctgggaagggaaatgcgcgacatggaaggtgatctgcaagagctgcatcagtcaaacaccggggataaatctggatttgggttccggcgtcaaggtgaagataatacctaaagaggaacactgtaaaatgccagaagcaggtgaagagcaaccacaagtttaaatgaagacaagctgaaacaacgcaagctggttttatattaaatatttgacttaaactatctcaataaagttttgtagctttcaccaaaaaaaaaaaa

SEQ ID NO: 217 - DNA, 1203 bp, Homo sapiens
  CDS (259)..(1200)
cactgtgctggcggctgggccttctccacctcctcgtctttctgccgggaaccttgacgacgccttccgcttggccctgccttctgccgcatccccgccgccgcggcgccttgaggagcaggagaagacgcagccgggccgccgccgttagaggggttcccggccgccgctcgccccgtcggccgccaccgcctccggggtcagccctctctctgggtctccgctttctcctgccgccagcgcccgctcatcgccgcgatggggctcctggactcggagccgggtagtgtcctaaacgtagtgtccacggcactcaacgacacggtagagttctaccgctggacctggtccatcgcagataagcgtgtggaaaattggcctctgatgcagtctccttggcctacactaagtataagcactctttatctcctgtttgtgtggctgggtccaaaatggatgaaggaccgagaaccttttcagatgcgtctagtgctcattatctataattttgggatggttttgcttaacctctttatcttcagagagttattcatgggatcatataatgcgggatatagctatatttgccagagtgtggattattctaataatgttcatgaagtcaggatagctgctgctctgtggtggtactttgtatctaaaggagttgagtatttggacacagtgttttttattctgagaaagaaaaacaaccaagtttctttccttcatgtgtatcatcactgtacgatgtttaccttgtggtggattggaattaagtgggttgcaggaggacaagcattttttggagcccagttgaattcctttatccatgtgattatgtactcatactatgggttaactgcatttggcccatggattcagaaatatctttggtggaaacgatacctgactatgttgcaactgattcaattccatgtgaccattgggcacacggcactgtctctttacactgactgccccttccccaaatggatgcactgggctctaattgcctatgcaatcagcttcatatttctctttcttaacttctacattcggacatacaaagagcctaagaaaccaaaagctggaaaaacagccatgaatggtatttcagcaaatggtgtgagcaaatcagaaaaacaactcgtgatagaaaatggaaaaaagcagaaaaatggaaaagcaaaaggagattaa

SEQ ID NO: 218 - DNA, 478 bp, Homo sapiens
  CDS (111)..(398)
gcgacccaatgggagtccccgccaggagacacaaccggcggctctccggggatttataaggtcccgccagcaaccgcgcgttgggattcgtggtgttgctggagacccgtatggtgtctgcagtcagcgaccctccaacttcaactactggatcaaccatgtgtgagtgcatctccatccatgtgggccaggccggagtgcagatgggcaatgcctgctgggagctgtactgcctggagcacgacatccagcccagtggcaccatgcccagccacaaggccctggggagcagtgataactccttcaacaccttcttcagggagacccagcctggcaggcatgtgtcctgggctgtctgtggacctggagcctgctgtcatagcacaatgaagtcgctgtagagggaagggaccactgaaggtgccacctgctctccccgtctcaagcccaggcaggacctggccttagaagtgggtct

SEQ ID NO: 219 - DNA, 3473 bp, Homo sapiens
  CDS (225)..(2672)
tcttaaccaccggccctctaggcctgggaggcattgagaaaaaggaagtgggtcctgttctggttcttgcgactatagtcacctcccgaggcaaatgaccactgtcctgagaggacgtgggtgaggggcaggaatcagtgtcattcaaggacgtaactgtagacttcagtagggatgagtggcaacaattagaccttgctcagaaaagcctgtacagagaagtgatgctggaaaactatttcaacttgatctcagtgggatgtcaagttcccaaaccagaagtcatcttcagcttggaacaagaagagccatgtatgttggatggtgagatccccagtcagagccgtccagatggggacattggttttggacctttacaacagaggatgtctgaagaagtttctttccagtctgagattaatattaatctcttcacaagagatgacccatattccattttagaagaattgtggaaagacgatgaacacacaagaaaatgtggagaaaaccagaacaaacctttaagtcgtgttgtcttcattaacaagaaaacactagctaatgacagcatctttgaatataaggacattggggaaatagttcatgtaaacacacacctggtttcctcaagaaaaagaccccataactgtaactcgtgtggaaagaatttggagcctatcataaccttatataatagaaacaatgcaacagaaaattctgataagactattggagatggtgatattttcactcatttgaattctcatacagaagtgactgcttgtgaatgtaaccaatgtgggaaacctctgcatcataagcaagctctcattcaacaacagaaaattcatactagagagagcctctatttgttttctgactacgtaaatgttttctccccgaagtcacatgcctttgcacatgagagtatttgtgctgaagaaaagcagcatgaatgccatgaatgtgaggcagtcttcactcagaagtcccagcttgatggcagtcagagggtttatgcaggaatatgcactgaatatgagaaggatttttccctcaagtcaaaccgtcagaaaactccttatgaggggaattactataaatgcagtgactatggaagagcctttatccagaagtcagatctgttcagatgccagagaattcattctggagaaaaaccttatgagtacagtgaatgtgagaaaaacctccctcagaattcaaaccttaatatacataaaaaaattcatactggagggaaacactttgaatgtactgaatgtggaaaagctttcacaaggaaatcaacactaagtatgcatcagaaaatccatacaggagaaaaaccttatgtatgtactgaatgtgggaaggcctttatccggaagtcacattttatcacacatgaaagaattcatactggagaaaaaccctatgaatgcagtgactgtgggaaatcctttattaaaaaatcacaactccatgtgcatcagcgaattcacacaggagagaatccctttatatgttcagaatgtgggaaggtcttcactcacaagacaaatctcattatacaccagaaaattcatacaggagaaagaccctatatatgtactgtgtgtggtaaggcctttactgacaggtcaaatctcattaagcaccaaaaaattcatactggagagaaaccttataaatgcagcgactgtggaaaatcattcacctggaagtctcggctcaggatacatcagaagtgtcatactggagagagacattatgaatgcagtgaatgtgggaaagcattcattcagaagtcaacattaagtatgcaccagagaattcatagaggggaaaaaccatatgtttgcactgaatgtggtaaggccttcttccacaaatcccattttattacacatgagagaattcatactggagagaaaccctatgaatgcagtatttgtgggaaatccttcactaagaaatcacagctccacgtacatcagcagattcacacaggagagaaaccctataggtgtgctgaatgtggaaaggcttttactgacagatcaaatctctttacacaccagaaaattcacactggagagaaaccttataaatgtagtgactgtgggaaagccttcactaggaagtcaggtctccatatacatcagcaatcccatactggagaaaggcattatgagtgcagtgaatgtgggaaagcctttgcaagaaaatcaacactaattatgcatcagagaattcatacaggagagaaaccctatatttgtaatgaatgtgggaaatccttcatccagaagtcacacttaaatagacacaggagaattcatactggagagaaaccctatgaatgcagtgactgtggcaagtctttcattaagaaatcacaactccatgagcatcatcgaattcacacaggagagaaaccatatatatgtgctgagtgtggaaaggccttcaccatcagatcaaatcttattaaacaccagaaaattcatactaaacagaaaccctataagtgcagtgacttggggaaagccttaaactggaagccacaactcagtatgcctcagaaatctgacaatggggaagtagagtgctccatgccacaattatggtgtggggactcagaaggtgaccaaggccaactttcttctatctagttagaattatgaacatctggatcatatagctgatgtgtagttacacatatggggagacacttttgagagtgtttaagcaatgtatagtggccatctttggttacttgatattggtgttgtcaagctcctgcaaataatagtaaatgtgcaaggagatgatggcagtctttcttgtttcacttttgggcaaacagttttataaattcatggctgtgagtttttcatgttctgggtaccacaactatcaatattgacccccaaaaattcataatgagtagtatgatggataattttacatgtctaagcagcctaaggacactgagatcaaggcaaagagagggcaatttaggtctataatgaaagtgaatcagcagttttgtgaaaacactaaagacagaaagaaaggactctactttttttaaaattttcttgggaagtcaccattatttatcgttatatctgtggcgtatgctggggcagcagttagccaagaggtctgaaatgctcttgcctatttctcaaaagtctatattattaccttagaactggcctacgatcatggaacttagatacagggacccaggtctagaatgcagcactttagatcctcagctttccacacagaaactgcacttttgatgtggggtgtaccaactcctggttggacaatgggccatttagaaacgtgggtttccaatcctaaatttttcccctaatttggtgtgctcctacggcggtctggtggattccctggacacaggtttggagttggtgtgcttgaaaaaggggggctggagc

SEQ ID NO: 220 - DNA, 661 bp, Homo sapiens
  CDS (34)..(429)
  misc_feature (1)...(661): n = a,t,c or g
ctcattccagtcctttcgcccacgcagggaacgatgcctctggaggtggtggtggagctgcagatccgggcgatttcttgcccaggagtgttcctgcctggcaaacaagatgtgtacctcggggtctacctcatgaatcagtacctggagaccaacagctttccctctgcgttccccattatgattcaggagagcatgagatttgaaaagggcattgctcccaaaatagagttttctacaaggacagccatcagagaatgtgtgtttctgcatagaaacagatttcttggctggggaaacaaagggaagatgttggttcagcaagaacacagaagcttaaagaagaaactgaacagaaatgggacccagacctctggagaagggctgctttcctggatgcttcttcaggaattcgaaggaagaaagacatgagtcacggaggcctttatctacatcacatgaaccaatatttcccttaaatactataaagatgaaactaaaggagaataatctcaacagactgcccaaaggcatgcaagcccgggcgccctctcaatattctaccaggcatttcttccaggaccagccagctcagttgaaccttggaaataatttcaaaatctctggaggaagcaagcctcctttgtgtanaccntgaccc

SEQ ID NO: 221 - DNA, 828 bp, Homo sapiens
  CDS (29)..(691)
ccccagctcacctcctccccaccccagcatggccacgtctaccatgtccgtctgctccagcgcttactctgactcctggcaggtggacgcctgcccagagagctgctgtgagcccccctgctgtgcccccagctgctgcgccccggccccctgcctgaccctggtctgcaccccagtgagctgtgtgtccagcccctgctgccaggcggcctgtgagcccagcccctgccagtcaggctgcaccagctcctgcacgccctcgtgctgccagcagtctagctgccagccagcttgctgcacatcctccccctgccagcaggcctgctgcgtgcctgtctgctgcaagccagtctgctgtgtgcccgtctgctgcaagcctgtctgctgcaagcccatctgctgtgtgcccgtctgctctggggcttcctcttcatgctgccagcagtctagccgccagccggcttgctgcaccacctcctgctgcagaccctcctcctccgtgtccctcctctgccgccccgtgtgcaggtccacctgctgtgtgcccatcccctcctgctgtgcccctgcctccacctgccagcccagctgctgccgcccggcctcctgcgtgtccctcctctgccgccccacgtgctcccgcctctcttccgcgtgctgcggcctctcctcaggccagaagtccagctgctgacgggcaggtcccgtttctccagagttgttccagggccatctctgacttccgaaaatccttgcagccctgagccctgtctgagtctcctctgcccatagccactgcacctccagccagcaatgctgagctttcat

SEQ ID NO: 222 - DNA, 1575 bp, Homo sapiens
  CDS (180)..(1346)
cgggacctggcgcggcttttgtgttgggcagcgcgaatgtggcgagctcggtgcgtctccgctgctccttccccttatccctgggaggtccaagtggtcccgcggcagcttctgttgctctgggacctgcaggtcccggaaggtccttagggaggaccccagacaccggagactgggaaatggattcagtgtcatttgaagatgtggctgtggcctttactcaggaggagtgggctttgctggatccttctcaaaagaatctctacagagatgtgatgcaagaaatcttcaggaacctggcttctgtaggaaacaaatcagaagaccagaatatccaagatgacttcaaaaatcctgggagaaatctaagcagtcatgtggtagagagactgtttgaaattaaagaaggcagtcaatatggagaaaccttcagccaggattcaaatttgaatctgaataagaaagtttctactggagtaaagccatgtgaatgcagtgtgtgtggaaaagtcttcatatgtcattcagcccttcataggcacatcctgtctcacattggaaacaaactatttgagtgtgaggaatgtccagagaagttatatcattgcaaacaatgtgggaaagcctttatctctctcaccagtgttgacagacacatggtaacacacactagtaatgggccttataagggtccagtgtatgagaagccttttgattttcctagtgtatttcaaatgcctcagagcacttacactggagagaaaacatataaatgtaaacattgtgataaagccttcaattattcaagttatcttcgtgaacatgaaagaactcatactggagagaaaccctatgcatgtaagaaatgtggtaaatcattcactttttccagttctcttcgccaacatgaaagatctcatactggagagaaaccctatgaatgtaaggaatgtggcaaagccttcagtcgttccacttacttgggaatacatgaaagaacgcatactggagaaaaaccctatgaatgtataaaatgtggcaaagcctttagatgttccagagtcctcagagtccatgaaaggactcacagtggagaaaagccctatgaatgtaaacaatgtggtaaagccttcaaatattctagtaacctatgtgagcatgaaagaactcacactggagtgaaaccttatggatgtaaggaatgtggtaagtcgtttacttcttccagtgcccttcgaagccatgaaaggactcatactggagaaaaaccctatgaatgtaagaaatgtggtaaagccttcagttgttccagttcccttcgaaagcatgaaagagcttatatgtggtaaaaaacaacaacaacaaaacacctctgtcaatgtaagaagtgtgttaaagctttcagttattctagtttcattagaacacgtgaaaaaattaaaaactcaaattagagagaaacccaacacatgtaaggaagattagaatgtatgcaattttcctagttcccttctaaaacttagaaggacccgtcctgggaaagaacgtcataaaatacgaaaaatgtgttagaac

SEQ ID NO: 223 - DNA, 629 bp, Homo sapiens
  CDS (187)..(537)
cacctagggagttgcccccctagtggacggcctctcaggagatcctgaccaccctctgggaacctggactcctccaagcatcgtctttctcgcctgcatcttcggagagaggtgctgagcccttcctcatggatacggggtcccgggaggcagccttcaccagggacctgcccaggaaaccagcagatgcccagctgtagctgtgcattgatggcgccgtgcggcccggccgcaggtcccgcagccgtggagaggacccagcaggcggcgcggggagagcccggctcggcacgtggtcagctccaagtcagccctgaaatgtccattactcacaaagaaaaggaaaatgctcatttgaaagaaattcttctctttgtcaatgctgaggcattctctcagccccagccccacagtgctccagtgtgtgaagggcaacagctgacggggaagttcagcacatctgtgctgaccagggctggaggcgatgccagtccgtgcagctgggaacgcctcctctgctatggctggagccactgctgaagggactccacctggcacctatgccaccaatggcccctgaacgggtatctaggcccacccttaataaagatgagctgctcaaaaaaaaa

SEQ ID NO: 224 - DNA, 1589 bp, Homo sapiens
  CDS (262)..(672)
ttgggtgggaaaaagacccaagggcctgaaagggagggaaaggggagggtagcgggagggtagcaggtgagttcctagggctggaaggtttagcagcagcctggtgcagtgccctgtcatcaagacaaacccacggtcctcctgggtgcctaccaagcttggtttgtacaaaagcaaggtgggagtctatttttgtacatgagatacatcacacttacctgtgggccagtattgtgaagtgagtctgagttgtttacactgatgccttccctgcccaccacaaattgtgtacatagtcttcagatgataccacccctttccccagctcccaaccaagagctggttctaggcctgtgttatatgtcatatttagcgtttttatatatgacctttgatttctgttgtttgtattttagcacagtgtatgcaccttcatttaaatacatctgtgtgcatacagatacgcatatatgtgtgtgcgtatgcatatatctctcatctgtagtttccaagagttcagctgaagcagatggagtcctgcagcccaggagacaccctgcatccctgctaatagtgtttgccacaagtattagtgagtcttccttattaatattttcatttcagaagactgaagcaaagctgatagtgtttgctgtttctttggcagctaagtgagggtcttgggatgacttgctgtgttcctcaagctgcactttggggccatctctgcagtattagccccctttttgcttggtggtactctgtctgtgcctgtgtgtgtgtgtgatagtcactcttgcatggcttccatgtctggtttgtggcatttggggataaggtgctgaagccagagcatttgcagtttgtttgaggcctcgttgccaatgatagatcactcctgttgacctggtatgtctgcttgcttgctgcttttccttgctttctcttggaagaggaaaggactctggtcaggcccaggctgagtgagatgagctgcagctggctcatggccttcttagagcagagagaggagtatgtcattttactaagttcctaaacaaacatttatgcaggcaacactccttgcagatccagaaactgaggcacaatagggttatgacttgctcaagaatatgtagctgctagggggtaaatcaaggcatcacaatttctgttcagcgggcaggaataggctgtgaattgctagcactttttttttttaagcaattactttttgacttgttcctctgaaagtgcaagaggcgtacacctttcccaaatgtagactagaatctgcaggatgccacccactgtatagttctgctttcccagagaggaagaacttttagaaaccaaatgatcttaattgttattgcccacccctggcttttccgggtagaaaattcacagtaggaatgattgttaagagagagtgcttggaaccatgggttaacaggaaaggctacctaacttcacatatctgcaaccagagcagccaccaagcattacttagcagcaggaaaatgattgtatttgagttcctgtgtgtccaaaactgaggcaccatgttctttgaaaacatgccacct

SEQ ID NO: 225 - DNA, 1860 bp, Homo sapiens
  CDS (160)..(507)
ccgagaatagggttgcaccatcccagaagctgctgttagctcgccggtcctcggcacgccgcccgttcgcccctgcgctgtccgcccttcccctagcgttacttccggtccctcgctgagggggttcgtgcggctcccaggaggcgtgaaccgcggaccatgagcgtgggcttcatcggggccggccagctggcctatgctctggcgcggggcttcacggccgcaggcatcctgtcggctcacaagataatagccagctccccagaaatgaacctgcccacggtgtccgcgctcaggaagatgggtgtgaacctgacacgcagcaacaaggagacggtgaagcacagcgacgtcctgtttctggctgtgaagccacatatcatccccttcatcctggatgagattggggccgacgtgcaagccagacacatcgtggtctcctgtgcggctggtgtcaccatcagctctgtggagaagaagctgatggcattccagccagccccaaagtgattcgctgcatgaccaacacacctgtggtagtgcaggaaggcgctacagtgtacgccacgggcacccatgccctggtggaggatgggcagctcctggagcagctcatgagcagcgtgggcttctgcactgaggtggaagaggacctcatcgatgccgtcacggggctcagtggcagcgggcctgcctatgcattcatggctctggacgcattggctgatggtggggtgaagatgggtttgccacggcgcctggcaatccaactcggggcccaggctttgctgggagctgccaagatgctgctggactcggagcagcatccatgccagcttaaggacaatgtctgctcccctgggggagccaccatccacgccctgcactttctagagagtgggggcttccgctctctgctcatcaatgcagttgaggcctcctgtatccgaacacgagagctacagtccatggccgaccaagaaaagatctccccagctgcccttaagaagaccctcttagacagagtgaagctggaatcccccacagtctccacactgaccccctccagcccagggaagctcctcacaagaagcctggccctgggaggcaagaaggactaaggcagcatctgtcccctctgtgattcagagcccttagttgagagcccctgcgcggggaccctggccgggaatggatcagacggagcaaagggcagaaagcattgacgtaagagagccgggtgtacagaggtcatgcagagtaacaaacaacacggagaggtactgagcagaaagagggcgaaaagacaaacgacaaggatcaacaaggaagcaactggggggacagaaggctcattgacccacaggcgcccgcacacacatgccacgacgaaccccaagacaaccacaacccatggaggaaagccaggacggaaagcagaacaacaagggcgagcgcgaacagaaacacaccaaatggcaagaggggaacagacagagtggaaagcaggcgacgcacgagtaccagaggcaggagtgcaatacaaggaaacgtcgacacgacgaaaaagcaaagcagctcacaggaagcggagaccacaacgaacacaaccacagccagcatccggccaccacaacacgcacaccaaccaaaccggaaggacaacagagaagacacaacaccaaagacgcctacctaccccggcaacaccaacagacagaccgcacaagaggcaggcagaagaggagcaacaggagcgaaacgtaccaatgagagagacaaaaagtgagaggaaaaacggacaagaaaaggtgagacgagacacaccaggaggatccgaagcagaaagaatacaaatga

SEQ ID NO: 226 - DNA, 2277 bp, Homo sapiens
  CDS (197)..(2260)
gcgggcactttggcttgtgtcagttccatccgcgggtgccggatctggacctaggtgctgacagcgagaaggcgcgaggagagtcgttttctcagctgcacagccggggcctgacggtcgccggcggtggtgacagctttgctcttgtctccgcccggatcgtccaccgctcccggcccgctccgcccagagtccgatggcggcggcactgagggccccgacccaggtgagcgctgcgtcctcccggcctcctctgccctccccacccgaaactgagggacgcgtgaagggttttctgcagcccggaccgcactgtccagcacaatgtctttgttctggagatgatggcagcaatgaagatttggagcagaagagggaggtgatcttccccaggcctcatgaggctcctgtggctgagcacagacaacagactgtgggtttaagggagttggtagcaataccaaagaggaaagaggagactactgcaatagtccaggtttttgtagcctttgaggatgtggccatttacttctcccaggaggagtgggagctccttgatgagatgcagaggctcctgtaccgcgatgtgatgctggagaactttgcagttatggcatccctaggttgctggtgtggagcagtagatgaggggacgccttctgcagagagcgtttctgtggaagaactgtcacagggcaggactccaaaggcagatacatccactgataagagtcacccctgtgagatttgtaccccagtcctgagagacattttacaaatgattgagctccatgcctcaccctgtggacagaaattgtacttgggtggagcatcaagagatttctggatgagttcaaaccttcaccagctccagaagcttgataatggagagaagctctttaaagtggatggggaccaggcctcatttatgatgaactgcaggttccatgtgtcaggaaaacccttcacgtttggggaagtcgggagggacttttcagccacctcaggacttctccagcatcaggtgactcccaccattgagagaccacacagcaggattagacacttgagagttcccactggacgaaagcctctcaaatacactgaatccaggaaatcttttagagagaaatctgtattcattcaacaccaaagagctgactctggagaaaggccttacaagtgcagtgaatgtgggaaatcctttagtcaaagttctggctttcttcgacacaggaaagcacacggtagaacaaggactcatgaatgtagtgaatgtgggaaatcatttagtcgcaaaactcacctaactcaacaccaaagagttcacactggagaaaggccttatgactgcagtgaatgtggcaaatcctttcgccaggtatctgtcctcattcaacatcaacgagttcacactggagaaaggccttatgagtgcagtgaatgtgggaaatcttttagccacagcactaacctctatcgtcacaggagtgcccacactagcacaaggccttatgagtgcagtgaatgtggaaaatcctttagccatagcactaacctctttcgacactggagagttcacactggagtaaggccttatgagtgtagtgaatgtgggaaagcatttagttgcaatatctaccttattcaccaccaaagatttcacactggagaaagaccttatgtgtgcagtgaatgtgggaaatcatttggccagaaatctgtcctcattcaacaccaaagagttcacactggagaaaggccttatgagtgcagtgaatgtgggaaagtttttagccaaagctctggcctctttcgacacagaagagctcacactaaaacaaagccttatgagtgcagtgaatgtgaaaaatcatttagttgcaaaactgacctcattcgacaccagacagttcacactggagaaaggccttatgagtgcagtgtatgtgggaaatcttttatccgaaaaacccacctcattcgacaccagactgttcacactaatgaaaggccttatgagtgcgatgaatgtgggaaatcctatagccaaagctctgccctccttcagcataggagagttcacactggagaaaggccttatgagtgcagagaatgtgggaaatcttttacccgcaaaaatcacctcattcaacacaagacagttcacactggagaaaggccttatgaatgcagtgaatgtggaaaatcctttagccaaagctctggcctcttaagacacagaagagttcatgtgcagtgaatgtgggaaattat

SEQ ID NO: 227 - DNA, 1492 bp, Homo sapiens
  CDS (160)..(1374)
gcagcggtgctctaggcgccggaagggggcgtgaatcggtgcgaccgcgcgcgtgcgcagtaccgggtccgcgcctgtccccgaaacttcgcaccccgtcgaactctcgcgagagcggtatctgcgtgtcgggacgtgcggaggctctcactttccgtcatggcgctgaaggtagcgaccgtcgccggcagcgccgcgaaggcggtgctcgggccagcccttctctgccgtccctgggaggttctaggcgcccacgaggtcccctcgaggaacatcttttcagaacaaacaattcctccgtccgctaagtatggcgggcggcacacggtgaccatgatcccaggggatggcatcgggccagagctcatgctgcatgtcaagtccgtcttcaggcacgcatgtgtaccagtggactttgaagaggtgcacgtgagttccaatgctgatgaagaggacattcgcaatgccatcatggccatccgccggaaccgcgtggccctgaagggcaacatcgaaaccaaccataacctgccaccgtcgcacaaatctcgaaacaacatccttcgcaccagcctggacctctatgccaacgtcatccactgtaagagccttccaggcgtggtgacccggcacaaggacatagacatcctcattgtccgggagaacacagagggcgagtacagcagcctggagcatgagagtgtggcgggagtggtggagagcctgaagatcatcaccaaggccaagtccctgcgcattgccgagtatgccttcaagctggcgcaggagagcgggcgcaagaaagtgacggccgtgcacaaggccaacatcatgaaactgggcgatgggcttttcctccagtgctgcagggaggtggcagcccgctaccctcagatcaccttcgagaacatgattgtggataacaccaccatgcagctggtgtcccggccccagcagtttgatgtcatggtgatgcccaatctctatggcaacatcgtcaacaatgtctgcgcgggactggtcgggggcccaggccttgtggctggggccaactatggccatgtgtacgcggtgtttgaaacagctacgaggaacaccggcaagagtatcgccaataagaacatcgccaaccccacggccaccctgctggccagctgcatgatgctggaccacctcaagctgcactcctatgccacctccatccgtaaggctgtcctggcatccatggacaatgagaatggcctggtgtgtgccgagcctgcctgtgtcctacagatgcacactccggacatcgggggccagggcacaacatctgaagccatccaggacgtcatccgccacatccgcgtcatcaacggccgggccgtggaggcctaggctggccctaggaccttcttggtttgctccttggattccccttcccactccagcaccccagccagcctggtacgcagatcccagaataaagcaccttctccctaaaaaaaaaaaa

SEQ ID NO: 228 - DNA, 1846 bp, Homo sapiens
  CDS (44)..(1843)
ttctgcttttccagaatcctgccctttccaaaaggaagacggtatgattaagttccaggaaagggtgacattcaaggacatagctgttatcttcaccaaggaagagctggcagtattggataaagcccagataaacctgtaccaagacgtgatgctggaaaacttcaggaacttcatctcagtgggtgattcacaaattctctttcttctcatgggagatgggattaaaaacaacattttgaatcttcagggaaaggggttaatttacctttctcaagaagagcttcattgctggaagatttggaaacaaaggatccgggatttaagtgtgagtcaggattatatcatgaaccttcaagaacagtgttccccacatttagaagatgtatccctctgtgaagagtgggcaggcatgtctcttcagatttctgaaaatgaaaactatgtagtaaatgccattatcaaaaatcaagatatcacagcatggcaaagcctgacacaggttcttactccagaatcttggaggaaagccaacataatgaccgagccccagaaatctcaggaaagatataagggaatttacgtggaagagaaattgtacagacgtgttcggcatgatgagagcctcaattggacctcatgtgatcatcatgagtcccaagaatgtaaaggagaggaccctggtagacaccccaactgtgggaaaaacttgggtatgaaatcaacagttgaacaacatcatgtggtccatgttttaccacagcctttcacatgtaataactgtggggtggcctttgcagatgatacagatcctcgtgcccatcacagcactcacctaggagaaaaatcttataaatgtgaccagtatggaaagaacttaagtcagagccaatatcttatcattcattgtaaaacccactcaagagagactccctatgaattgcacgaatggcctacaggctgcaaacagagctcagaccttcccagatgtcagaaagtcccctcaggagacaatccctacaaatgtaaagaatgtggcaagggcttcaggtgcaactcctcccttcacaaccatcatcgagtccacacaggggagatgccctacaaatgccacgtatgtgggaaagcgtttggatttaggtcacttccttgtattcatcagggagtacacacagggaaaaagccctacaaatgtgaagattgtgggaagggctttgaacagagctccaaccttcttatccatcagagagtccacactggagagaagccctacaaatccagtgagtgtggcaagtgctttagttcaagctccgttcttcaagtccactggaggtttcacacaggggagaaaccttataggtgtggtgagtgtggaaagggcttcagccaaagtacacaccttcacattcaccagagagtccacacaggggagaaacaatacaatgcaatgtgtgtggaaaggattttgggtatagttctgttcttcacactcatcagagagttcacactgcagaaaaaccatataaatgcgaagtgtgtggaaagtgctttagttacagttcatattttcacttccatcaaagcaatcacacaagagagaaaccatataaatgtgatgagtgtggtaaaggcttcagttggaattcagatcttcaatgttcatctcagagtccacagaggacagaggccctgtaagtgtaaggcatgtggtaagggcttcagtcgtaattcgcacctccttgcccaacagagagtgcgtatagataagacacagtacacacattgtgagcatggcaaagaccttctgactcatcaaagactacatgagcagagagaaacattataa

SEQ ID NO: 229 - DNA, 798 bp, Homo sapiens
  CDS (17)..(529)
  misc_feature (1)...(798): n = a,t,c or g
tcagctcgcactgcatatgcaacgcaactcaactcatgctgcgtatgcaactcaactcacactgtatgcaactcagctcgctctgcatatgcaattcaactcgcactgcgtatgcaaatcaacttactgcatatgcaactcaactcactgcgtatgcaactcaactcgcactgcgtatgcaactcaactcgcactgcgtatgcaactcaactcgcactgcgtatgcaactcagctcgcactgcgtatgcaactcaactgttgcaagtacttatttccggccacttcctttttctaactaccacaccaagccagtatttctcctccctgaagtcagcccaggatgaggcactagacagcaggacatgctgtatgcccttgggcctgctggaagtatgcagactagccagccccagacttcatcctgccctgtcctgcctttcctgtgaaaaccctgtggcctctgcctcccctggctctgacttctgcctcctgcccagctctgcagctccccttgggccctgcctggagtgatgtgccgccttctcttgacactgtgagtgataaactttccatgtcaggaacctgtgtgtgtcactcactcaccttgacgagtccgcgtctaggccccaccagtggtgtggttttcctcatagtctctctacctaagcacatgtctgtgacaaggtcttacccagcccanggattcttgaactatctgtaggaactgccatgttgactcctggcagttttattctttctctctactcgntcaaccttcttanggagtgacgtttttt

SEQ ID NO: 230 - DNA, 1482 bp, Homo sapiens
  CDS (97)..(1479)
ggctgcggaattcggcacgagaggctccatcgccctgtggcctgcaggtattgcgagatttatagggaggacgctgggacccccaaaagctgggaaatgggactattggcattcagggatgtggctctagaattctctccagaggagtgggaatgcctggacccagctcagcggagtttgtatagggatgtgatgttagagaactacagaaacctgatctcccttggtgaggatagcttcaatatgcaattcctatttcacagtcttgctatgtctaagccagaactgatcatctgtctggaggcaaggaaagagccctggaacgtgaacacagagaagacagccaaacactcagttttgtcttcttatcttactgaagacattttgccagagcagggcctgcaagtttcattccaaaaagtgatgctgagaagatatgaaagatgttgtcttgagaaattacgcttaaggaatgactgggaaattgtgggtgagtggaaagggcagaaggcaagttataatggacttgacctatgctcagcaactactcatagcaaaaactttcaatgcaataaatgtgtgaaaggttttagtaaatttgcaaatctaaataaatgtaagataagccatactggagaaaaaccattcaaatgcaaagaatgtggcaatgtctcttgcatgtctttaataatgactcaacagcagagaatccatattggagagaacccgtaccaatgtaaaaaatgtggcaaagcctttaatgagtgctcatgctttactgactgtaagagaattcatgttggagagaaacattgcaaatgtgaagaatgtaataacatttttaagtcttgctcaagtcttgctgttgttgagaaaaatcatactgaaaagaaaacctacagatgtgaagaatgtggcaaagcttttaacctgtgctcagttcttactaaacataagaaaattcatactggagagaaaccatacaaatgtgaagaatgtggcaaatcctttaagttgttcccataccttactcaacacaagagaattcatagtagagagaaaccctacaagtgtgaagaatgtggcaaagtctttaaattgttgtcataccttactcaacatagaagaattcatactggagagaaaaccttccgatgtgaagaatgtggaaaggcctttaaccagagctcacatctgactgaacataggagaattcatactggtgagaaaccatacaaatgtgaggaatgtggcaaagcttttacctggttctcataccttattcagcataagagaattcatactgggcagaaaccctacaaatgtgaggaatgtggcaaagcttttacctggttttcataccttactcaacataagagaattcatactggagagaaaccctacaaatgtgatgaatgtggcaaagcttttaactggttttcatatcttactaatcataagagaattcatactgaagaatga

SEQ ID NO: 231 - DNA, 1828 bp, Homo sapiens
  CDS (165)..(1661)
ggggagggagggccgaacgggcgaggttgggctgccgtgctgctcggcggcgctgaggccaaatagttgcatcacatgtatctaatccgagagtctcatgcttctggtagctcctcagtgaccagctcctgctcactgccctcagaaagcccaaccctcaggcaatggcggccttgttcctgtctgccccaccccaggccgaggtgaccttcgaggacgtggctgtgtacctctcccgggaggaatggggccgcctgggccctgctcagaggggcctctacagggacgtgatgctggagacctacgggaacctagtctcactggctcttgggaccagaactgagtacaaggagttgacttcacaggagacatttggtgaggaagatccccagggatctgagccagtagaagcctgtgaccacatcagtaagtcagaggggagcctggaaaagctagtggagcagagaggccccagggcagtcacactgaccaacggggagagcagcagggagtctgggggaaacctcaggttgctgtcaagacctgttcctgatcagagacctcacaaatgtgatatatgtgagcaaagttttgaacagagatcatatctcaacaaccataagcgtgtacacaggtcaaaaaaaacaaatacagttcgtaactctggggaaatcttcagtgcaaacttagttgttaaagaagatcagaaaattcctactgggaaaaaattgcattattgcagttactgtgggaaaacattcaggtacagtgccaaccttgtcaagcatcagcggcttcacactgaagagaagccctacaaatgtgatgagtgtgggaaagccttcagccagagctgcgagttcatcaatcaccgaaggatgcactcaggagagattccctaccggtgtgacgagtgtgggaagacattcacccggaggcccaacctcatgaagcaccagaggattcacactggggagaaaccctacaagtgtggggagtgtgggaagcactttagcgcctactcttccctgatttatcaccagagaatccacaccggagagaaaccctataaatgtaatgactgcgggaaagccttcagtgatggctcaatccttatccgacatcgtcggactcacaccggagagaagccatttgagtgcaaggaatgtggcaaaggctttacacaaagttctaaccttatccaacatcagagaattcacactggagagaaaccctataaatgtaatgaatgtgagaaagctttcattcaaaaaaccaaactcgtggaacatcagagaagccacactggagagaagccctatgaatgcaatgactgtggcaaagttttcagccaaagcacacacctcatccagcaccagagaatccacacaggagagaagccctacaagtgcagcgagtgtgggaaggccttccacaacagttccagactcatccaccaccagaggctgcaccacggagagaaaccctacagatgcagcgattgcaagaaagccttcagccagagcacgtacttgattcagcaccggaggatccacaccggggagaagccctacaagtgcagcgagtgtgggaaggccttccggcacagttccaacatgtgtcagcatcagcggattcacctccgggaggacttctccatgtaacagtggcgcggtgtccgagggcagagtccagctgagcacttcctgcatgcgcccccggcacctgactctgccctttatgtattatccacacgatgttttcacagagtgaaaggacgtttctcattaaacaaacctcttttcttaaatcaaaaaaaaaaaaaaaa

SEQ ID NO: 232 - DNA, 1230 bp, Homo sapiens
  CDS (1)..(1227)
atgtctggcagttgctcttctaggaaatgcttctccgtgccagccacctctctctgctccactgaggtgagctgtggaggccccatctgcctgcccagttcctgccagagccagacatggcagctggtgacttgtcaagacagctgtggatcatccagctgtgggccacagtgccgtcagccctcctgtcctgtgagtagctgtgcccaacccctgtgctgtgatcctgtcatttgtgagccttcttgctccgtgagcagcggctgccaacccgtgtgctgtgaggccaccacctgtgagccttcttgctctgtgagcaactgctaccaacctgtgtgcttcgaggccaccatctgtgagccttcttgctcagtgagcaactgctgccaacctgtgtgctttgaggccaccgtttgtgagccttcttgttccgtgagcagctgtgctcaacctgtgtgctgtgagcctgctatttgtgagccttcttgctccgtgagcagctgctgccagcctgtaggctctgaagccacttcctgccaaccagtcctctgtgtgcccacttcctgccagcctgtcctctgcaaatccagctgctgccagccagttgtctgtgagcccagctgctgttcagctgtctgcaccctgcctagttcctgccaacctgtggtctgtgagccttcctgctgtcagccggtgtgcccgacacctacctgctctgtgaccagtagctgccaggctgtctgctgtgaccccagcccttggtcttctgcatctgccatctgccgaccaacttgtcctaggactttctacatacccagttccagcaaacggccttgcagtgctacgatttcctaccgcccggtctcccgtccgatctgccgcccaatctgctctggactcctcacctataggcagccatacatgacatccatctcctaccgtcctgcctgctatcgcccatgctactccatcctgcgccgcccagcctgtgtcacttcctactcttgccgcccagtctacttccgcccatcttgcactgagtctgactcttgcaaacgggattgcaaaaaatccacttccagccaactggattgtgttgacacaaccccctgcaaggtggatgtctcagaagaggctccctgccagcccactgaagccaaacccatcagcccaaccacccgtgaggccgcagcagctcagcctgctgccagcaagcctgccaactgctaa

SEQ ID NO: 233 - DNA, 2270 bp, Homo sapiens
  CDS (503)..(2158)
gtcagctagcaatcatccaaaaggacccagcaccagccagaggcaggccggcccgccccgcttcctggcaagcacagcaaacatctccttcgctgccaaacacggcccaggaatgactacaggagatatttcaggggatcccctggatacgatggactccttgtctccgttgtatggcagcaacagcttctcggtggacagtcaggtggaggagggcgatggacgccttcagccccaggcacccagctggccggcagctgaggagggagagggggagcgtagccttacagcacgagagcacagccctgaggaggcgcgggagctgcgggctgcggtgatccagcttctggacacctcctatctgctcactcctgtggcccaggcccagctcctgtggctgctgggctgggccctgcggggtctgcagggacagccaccggcactcttcaagccgcagctggtacggctgctaggcacagcacagctgacactgttgcacgccatgcttgcgctcaaggcggcctttggtgaggccttgttcacagcccaggatgaagcgttgctgctccgccggctcaccttggctgcccagcaccctgctctgcctccgcccacccatctcttttaccttcactgcgtcctgagcttccctgagaactggccgctgggccctgaaggtgaggaggctgccccactgctgctagggccccagctatgccgtggtctcctgcccagtctcctgcatgacccaatggccctcctggcccgcctgcatttactgtgcctgctctgtgccgaggaggaagaagaggagaaaggccagcttccaagcccacggcactacctggaagagctgctggctggcttgcggcagcgggcagccctggatgggggcccccgggccttggccactctctgcttccaggcctcgtatctggtggcctgctgcctggctgggcaacctacggtgctgacccccttgatccacggactggcccagctgtaccaagcccggcccatgctggctccccactttgtggacctcttggatcaggtggactctgagctgagggagcccctgaaggtggtgttgcggcaggtggtggtgtccaggccgggcagggatgaagctctttgctggcacctgcaaatgctggcaaaggtggcagatggagatgcccagagtgctaccctcaactttctacaggccgcggctgcccactgcacgaactgggacctacagcagggcctgctgcgggtctgccgggcgctgctgcgggcaggggtgaggggcggcctggtcgacttgctgcaggtgctggccaggcagctggaggaccctgatgggcgtgaccacgcccgcctctactacatcctgctggcacacctggcagcacccaagttgggggtggccctgggcccctcgcttgccgcacctgcactggcctcttcactggtggccgagaaccagggctttgtggcagcactgatggtgcaggaggcaccggccctggtacggctgagcctggggtcccatcgggtcaagggcccactcccagtgttgaagctccagccggaggcgctggagcccatctactctctggagctgcgcttccgtgtggaaggacagctgtatgcacccctggaggctgtccatgtgccctgcctgtgtcctggccgccctgcccgccctctgctcctgcctctgcagccccgatgcccggcccccgcacggctggatgtccatgccctttacaccacatccactggtctcacgtgccatgcccacttgccacccctgttcgtgaactttgccgacctctttctgcctttcccgcagcctccagagggggccgggctgggcttctttgaggagctctgggattcctgcctgccagagggtgctgagagtcgtgtgtggtgtccacttgggccacagggcctggagggcttggtgtcccgccacctggagccttttgtggtggtggcccagcctcctaccagctactgtgtagcaatccacctgcccccggactcaaagctgctgctgcggctggaggcggccctggcagatggagtgcctgtggccctgcggaccgatgactgggccgtgctgcccctggcgggggactacctccgtgggctggcggctgctgtctgagccccgggagaccaggtgggggcaggactgtggcccttgtgggggccaaggcacactcctgtagctctgtcgccaaaaccctgcattccgcagtgccctcgctggcttg

SEQ ID NO: 234 - DNA, 487 bp, Homo sapiens
  CDS (275)..(448)
gcttttctcaatgcttggaacccttagcgaatttgctgacagtttgatctggatttactcatggcacctgcacctatttattttcctcatttcttttccttttattcttcaccatcattgctattatagtcactatttcatatttattgaatattaataatatacatattataaattcaggcctatataaagtggcactaagattcatatgctataattttgggtccataaataaaacaaatgtgtgcaggcaaacattgtctacaagtaataaatgctttgcataaatgtgcagacacacgtgtatgaatgtgctatgcaaatacccttccttttagaagtatttgttattcatacaggtgttttaggaagtaaattgcttaaatctggtggtctttttgatttaacatccttttcaccaatgataatttgctttagtaataaaagttagtctcttgttgttactggaatattgttaattcatcaa

SEQ ID NO: 235 - DNA, 1093 bp, Homo sapiens
  CDS (52)..(714)
ggtccagtggccgcccaggcgcgaccagatctgggtgcgcggagagcgcgcatggcggctgtgggaccgcggaccggccccggaaccggcgccgaggctctagcgctggcggcagagctgcagggcgaggcgacgtgctccatctgcctagagctctttcgtgagccggtgtccgtcgagtgcggccacagcttctgccgcgcctgcatagggcgctgctgggagcgcccgggcgcggggtctgttggggccgccacccgcgcgccccccttcccactgccctgtccgcagtgccgcgagcccgcgcgccccagtcagctgcggcccaaccggcagctggcggcagtggccacgctcctgcggcgcttcagcctgcccgcggctgccccgggagagcacgggtctcaggcggccgcggcccgggcagcggctgcccgctgcgggcagcatggcgaacccttcaagctctactgccaggacgacggacgcgccatctgcgtggtgtgcgaccgcgcccgcgagcaccgcgagcacgccgtgctgccgctggacgaggcggtgcaggaggccaaggagctcttggagtccaggctgagggtcttgaagaaggaactggaggactgtgaggtgttccggtccacggaaaagaaggagagcaaggagctgctggtgagccaggcacccgcaggccccccgtgggacattacagaggcctgagaactcagcaccagggctcggtgtgtgtggtgttggagtgtgtgctatggaaccgcagaatcgatttcagaaagataatagagtccatattatatagggtgtccacataattgttgtacaaaccagagctttttaaagtgaaaagcagtgctaaaataattattgcaaaacaactggcttaaactggagctgtcccagcgaatcaggacgctcagtcactctgatattacgtaacataccagttagggcctgcggaagcatcttgtaatggaacacattactatttctgcagagaaacatggatattcaataagtgggaatattaatacaataaagagcctcatggcatgttttgtcaacaaaacagtagtgaaaa

SEQ ID NO: 236 - DNA, 2012 bp, Homo sapiens
  CDS (90)..(1724)
cgagcggctcaggtgtcctgtcgtgctcacctgcgccggtcgctggaccgcggggcgctaaccctggagagcccaggagcgggcgggacatggactgcgtgatctttgaggaagtggctgtgaacttcaccccagaagagtgggcattgctggatcatgctcagaggagcctctacagagatgtgatgctggagacctgcaggaaccttgcctccttggattgttacatttatgttagaaccagtggatcaagttctcagagggacgtttttgggaatggaatatccaatgatgaagagattgtaaagttcacaggaagtgattcctggtctatttttggagaaaattggagatttgataacactggagatcagcaccaaatcccacagaggcatctgagaagtcagctggggagactctgtgaaagtaatgaaggtcatcaatgcggagagaccttgagccagactgcgaaccttcttgtgcacaagagttaccctaccgaagctaaaccctctgagtgcactaagtgtggcaaagccttcgagaatcggcagagatctcacactggacagagaccgtgtaaggaatgtgggcaagcctgcagctgcctctcctgccaaagccctcctatgaaaacgcagactgtagagaaaccctgtaattgccaggactcaaggacagcatctgtgacatacgtgaaaagtctcagcagtaaaaagtcttatgaatgtcagaaatgtggaaaagctttcatttgtccctcatctttcaggggacatgtgaatagtcatcatgggcagaaaacccatgcatgtaaagtatgtgggaagacctttatgtattactcctaccttacacggcacgtaagaactcacacaggagagaaaccctatgagtgtaaggagtgtgggaaagccttcagctgtccctcgtactttcgagaacatgtcagaacacacactggagagaaaccgtatgaatgtaagcattgtggaaaatcattcagctgttactcctcctttagagatcacgtgaggacgcacactggagagaaaccctgtcagtgtaaacattgcggaaaagcgttcacttgttactcgtctcttcgagaacatgggagaacgcacagtggagagaaaccctatgaatgtaaggaatgcggcaaagccttcaggtacccctcctctctgcgagcacacatgagaatgcacaccggagagaagccctatgtgtgcaagcagtgtgggaaggccttcggatgtcccacttactttagaagacatgtgaaaacacacagcggggtgaagccctatcaatgtaaagagtgtgggaaagcctacagtttttcctcctcccttcgaatccacgtgaggacgcatactggagagaagccctttgagtgtaagcattgtgggaaagccttcagctgtcactcctcccttcgagagcatgtgcgaacccacagcggagagaaaccgtacgaatgtaatcaatgtgggaaagccttcagccacgctcagtactttcaaaagcatgtgagatcacacagtggggtcaaaccctacgaatgtactgaatgtgggaaagcctacagttgttcctcgtcccttcgtgtgcacgtgagaacgcacactggagagagaccgtatgaatgcaagcagtgtgggaaaaccttcaggtatctcgcatcgcttcaagcacatgtgagaacacatgctggagcgtgaatctacaaatacagtggacctgggagagtgttcaaccgtaaaaccttgttgtaaatgtgagaaacgttatttatgtagagcatgtaggaaaacctggtatagcacttattttgtacctaaaaattcagagtaggagagaaatctcttaattatgattaatatggtattgcctttacatgcctcagccttaatagtgattccttttgtattaatttctagtgtatgtttgtgatataaacatttaataaatatcctgttttgtacgctttccaaaaaaaaaaaaaa

SEQ ID NO: 237 - DNA, 3308 bp, Homo sapiens
  CDS (76)..(2148)
tgtcgttgttctgagggtacaaggctgaaaggcactgtgctgcctgtggccaccatccagaacgccagtactgccatgctgatggcagccagtgtggctcgcaaggctgtggtgctgcctggggggactgccaccagccctaagatgattgctaagaacgtgctaggcctggtgccccaagccctgcctaaggctgacgggcgggcagggctggggactgggggacagaaggtgaatggtgcctcggtggtgatggtgcaaccttcaaagacagctactgggccaagtacagggggcggcacagtgatatcacggacccagtccagcctggtggaggccttcaacaagatcctcaacagcaagaacctgctccctgcctatgggccaaacctgagcccaccagctgaggctgggctggccctgcctcccaccggctaccgctgcctggagtgtggggatgccttctcattggagaagagcctggcacggcactatgaccgtcggagcatgcgcatcgaggtcacctgcaaccactgcgcccgccgcctggtcttcttcaacaagtgcagcctgctcctgcatgcacgtgaacacaaggacaaggggctcgtcatgcagtgctcacatttggtcatgaggcctgtagcccttgaccagatggtggggcagccggacatcacaccgctgctgcctgtagctgtcccacctgtctctggacctctggccttgcctgccttgggcaagggtgagggggccatcacctcctctgccattactacagttgctgctgaggcccctgtcctgccgctctccacagagccgcctgctgccccggccacctctgcttacacatgctttcgctgcctggagtgcaaggaacagtgccgggacaaggctggcatggcagctcacttccagcagctcggcccccctgcccctggggccaccagcaatgtgtgcccaacctgccccatgatgctccccaatcgctgcagcttcagcgcccaccagcgcatgcataagaatcgacccccccatgtctgtcctgagtgtgggggcaacttcctgcaagccaattttcagacccatctccgggaggcctgtctgcacgtctctcgccgtgtaggatacaggtgccccagctgttcagtggtgtttgggggtgtgaactccatcaagtcccacatccagacgtcgcactgcgaggttttccacaagtgccccatctgccccatggccttcaagtctgggccaagtgcccatgcccacctctactcccagcatcccagcttccaaactcagcaggccaagctgatctacaagtgcgccatgtgcgacacagtcttcactcacaaacccctcctctcctcacacttcgaccagcacttgctgccccagcgtgtcagtgtctttaagtgcccgtcttgtcctctgctctttgcccaaaaaaggaccatgctggaacatctcaagaacacccatcagtctgggcgcttggaggagactgctgggaaaggggccgggggtgccctgctgacccccaagactgagcctgaggagctggctgtttctcagggaggggcagcccctgctactgaggagtcgtcttcatcttcagaagaggaggaagtacccagctcccctgagcccccccgtccagccaaacggcctcggcgggaactagggagcaaaggcctcaagggtgggggtggggggcctggaggctggacctgtggcctgtgtcactcctggttccctgagcgtgatgaatacgtggcccacatgaagaaggagcatggcaagtcagtgaaaaagttcccctgtcgcctgtgtgagcgctccttctgctccgcccccagcctgaggcgccatgtcagagttaatcacgagggcatcaagcgagtttacccctgcagaagcaagggccctggccttcgggctgtgccgctgctgccatcctgtcctctcccatttcaggtattgcacagagggaaaacgcaccttcagcagccgcctgatcctagagaaacatgtccaggtccggcacggcttgcagcttggggcccagtcccctggccgggggaccaccttggctcggggttccagtgccagagcccaggggccaggtcggaaacgccgccagtcttctgactcttgcagtgaggagcctgacagcacgacaccgccagccaagtcccccaggggcggacctggatctggaggccatggccctctgcgctaccggagcagcagctccacagaacagagcctcatgatggggttgagggtggaggatggtgcccagcagtgcctcgactgtggcttgtgctttgcctcccctggctccctgagccgacaccgtttcatcagccacaagaagagacggggtgtgggtaaagccagtgccctggggctgggggatggggaggaagaggcacctccatcaaggtctgaccccgatggtggagactcacccctgcctgcttctggaggcccactgacctgtaaggtctgtggcaagagctgcgacagccctctaaacctcaagacccacttccgcacgcatggcatggcgttcatcagggctcggcagggggctgttggggacaactagtctccaaggcctgggactgaccagccccttcctcttggagcctggttttccctactgctgcctgatccctcggctggggagttttcattaacattaatattttgttaattcctgtctctccaacctgaagaagaagagcatttgaggattattctagttatttgcaacctccctttgggtttggccctggagtcctagtagagtggaccctccattcctcctttctgagcccaacactaattaattttatgctcctgctgcagaacccccagtgtgggcctgggggtgggaggatgggacttaggtatgcctgctagacaggttcagggaaggactgatgggggtgtcatggatggacacacctctccacaattccttcaggcatggactggaactttcctcctctaggccgggccctgccctagtgcccacccccgcccccgcccccgcccaaccccaactcactggcactcaagccccctacccctgcagtgcctttcacttctttttttccccagaaatccggggcgggggggtggggggttggtagggatgagtcctgtcaagggggccacaggagaggaggggacaggctctcaggaatcctttattcttgtagtaataataatactaacaaacagttggggaactagggagaaaaccagaccattaaaactgtttgtggtcgaatctc

SEQ ID NO: 238 - DNA, 3055 bp, Homo sapiens
  CDS (1268)..(1807)
cctccgtggaaaaccggccaaagatctcagccttcctgcccgcccggcagctctggaagtggtcggggaatcccacacagcggcgtggcatgaaggggaaggcccggaagctgttctacaaggccatcgtgcggggcgaggagaccctgcgtgtcggggactgtgccgtcttcctgtcagctgggcggcccaacctcccctacatcggccgcatcgagagcatgtgggagtcgtggggcagcaacatggtggtcaaggtcaagtggttctaccaccctgaggagaccaagctgggcaagaggcagtgcgacggcaagaatgcgctgtaccagtcctgccacgaggatgagaacgacgtgcagaccatctcccacaagtgccaggtcgtggcgcgcgagcagtatgagcagatggcccggagccgcaagtgccaggaccggcaggacctctactacctggcgggcacctacgaccccaccaccgggcgcctggtgacggctgatggcgtgcccatcctatgctgagccgcccaccgcagatgcctcccacgtgcgccagggaccctgtgtgcggagcctggcgtcggccaagccaccgggcaggaggcagccccggcctcccaagggcgcatctgagcaaatatgcaaaagcccacagggcaagacccaggctttcttacggttttccctggaaagagcgctccaggtgtcggaatccagtcccgtcccatcctctgcggagggtcgggctgtggccctcatgggtccccggcccgcccagccacagcgccctccgtttcccgccacggcagttcacgggagattatgaatccaagccatattccctagtacctccgactgtctcccaccagggaaagcagaaatcaggtgtgttgtctatttatttctctatgtaaatattgtatttctgcggggaaattttatggtaaaaagtggcaaaagggtttttccccatccgcgtgacaaggtgtgtgtgagcgtgtatgtgtgtgcgcgtgtgtgccgatttttgtcctggggtttcctttggaaatgcactgttctcagcccagctgggttccaacgggggcacctgggacgacagaggcatctcggggcagggggcagaggccacgggagggtcaggtgggacccttgacggcaccctctgatctcttggggggacgaccgtgtaagatgaaagtcggtcaagtttatttgctttcagtgcatctcctagaaaagaagtgttggagcagggggtggtgatgaggggcccgtggggaaaggattcaagaggcaaagcccagaccagggagtgtgacaacagccgtgagcatctcacctgtgttcaaaacaagacaaagacgaacaaatattttaaagtattgataagaaaaagcaatgtttggattgtatctgctgaatcatattccaacctatatctgatttctgtttccggggccagttggtctgaggccaaggagtctggcctccacccagagcagggaggggctggcccctcgcccccctcaccctcgccgccctggcacactcgggaagcagggcccagctctgagcccctcctcacccctggggtcctaactttcctgaaagtagtaggtgccgtgagaaggggcagtttggccaggttcctgaactgggcagggctcggggcctatgagggcaggttcacagtcccaccagattctctcctcacccccaagcagaatgcatgcaaaagacaccccttttcccacccaccttattggtgcccccaaacccctggcctgctgcgtagatggtggtgaggccaggccagcagtgctgtggccaggggagaagaaaataaaacgcaggccctgcccttggggaaggcccctttctgggcccccttttccaccagccaaatctgcctggccctcggacccctctgcctgccccaacccctttggaggtttctcggccttttctgtgccacttggtggggcagatggcctgatgggctagtgcttggggcatagaatgagggtccccctgaccacctgagcccaaatcctggccccaggtgcaagcagcacccctcgagggctctgccccagtatccccagggaattcacacccctccccttctcccacagccaaggacagacaggctgcctggacctgagcccaacagccttcagcctcagaaacgcatggggggccacacactccttatatcctcccacactaaggttcccctggccccacgggagcttcaggaaagccccccaagttagccactgctctaggacgagctctgtgtcccccacaccacaggcctcgaagcagggtgctggtgggtgccctgcaccccaatcccaggtccccttggccccctatttttctcgggcccattggggcctgtttctcacctgctggctggaccccctgaagggccgttcccagaggctccccaggaggctcaagggctggggggcttatgttgtggtcggggggtccccgcctccagccccccgctcccacccgccgagcctaccctttgtctcgcatgagtgcaatatttcattcccggtggttgtctggggaggtggttggacgaggtcctgcttgaggctcggggatcagaacgatgtcaagtgaagaaaaatgcacgggggcatgctgagccactggagttccagagagggccgaggagggtgcagccacggaggttggatcctctgctccgccgcctcgtcctcgtcccgcttctgctgggttccgctttgtccctggttttttcctttttttttctgtgtgcgtgcgaatggtgcggcccctcccctctcaccgtggttaacgtgacgaaggcacgattcctgtaaatgtgtaaactaaggggatggttggattttttttcaatgtaaacactaaaaacaaaatggacaaaaaaacacacaaaggttttatgaacagcagactctatgtaaaggcattttagtatcaaattttttattgataacttgcttaagaataaatatatggactattgtacaggtaaaaaaaaaaaa

SEQ ID NO: 239 - DNA, 1438 bp, Homo sapiens
  CDS (959)..(1303)
tcttttggattattcccttaggaatatctccaaagagggattacaaggtcaaagagcatgaagtattttatagctcttgttttatattgccagattgctttctagaaagatccaatctttgggttggaaggaccttaaaggtcatctagtttagcctccccaccccctctgaatgcttgaatcccctcgacaatttatgatgccaccagcaatgtataagcatttctgtttaccaatagctctgccagtattgggttttgccatttttatttatttttgctagtttaataggtatgtatagttgttcttgaagagttgttttatttcattaattgctagcaaggctgagcacttttccatgtgatgatttactagttgtatttccttgtgtgtaaaatgttcattcatttcttatgaccacttgttaagaggaactgatctcatatatttgtatcagaactgtatttttatgttatattgtatagtttgctctcctgcccctctccttaaaactgaatggtgccaataatttgatactaatgactacaaaaaaaggtaatgcctcatttactagtattgttgtaaaatgaggaatgtatgtgaatattcagataaccgaggattaaccctttaagtgctgaatctttaaaattttaatatatttttttttgagggaaatctttctaaaatgtattacgcacttccctgccttagtaaacagagtatactggagagtatttaaccttttcttgatgagtcatggtcatgattataaacatcagccccttttataccttggtacggtgcagtgatatcattaagagctatcaatatgtgtagggcttggcttggccttttataggatattatgctgttctcactgatggttttttactgctctctgctctgtcagtggagctatccggggcaattgtagcgtttgggtccttttacccctatgtcccccggctatacttttaaaacagctttagctgttctttatcttgtgcacatgatacaaaatatgttcccgtacaatatggggctgtcacttcttgccaacccagcaccctcttcctcttctaacctgctttctgaggcttctgctcttcacctcctgctcgctgatggaaacctccagggcaaagctgaaggtttcttggggaagccaggaaagccagtatttcctatgtgtcagatctgcttggcttccaagaagggatgcatgggctttttggccagtgtttccaggaggctctgggcttcctgcttcttccccgcttcccccagagttcacagatgttgaagtttctgaaggttgacgtcactggaagtctgaccacaaacaagttggctgttactgtatttgaaacccagtacctttggcagctcacctctaaccagtaaaataagaggattccatggtaaaaaaaaaaaa

SEQ ID NO: 240 - DNA, 655 bp, Homo sapiens
  CDS (170)..(475)
ggccatgggccccattctccacacagaaggcaggggacaggtgcacaaggggctgagaccccagcagggctaactgtccttgtctcaggagccctacctggccagtcttgggccaggccttggggactgggagtaggggctgagccccgtctgtacagtctctggccccatgggcaccaggtgccagctcctcgcacccagtactcccattgctagggctgctggaacctgcagggtggcagagctgggcaggactcaccctataaccatgtccactgtggtgctgctgctgcagagaagtgtttccaatgctgcgacccgggtgtgtaggacggggaggtcacgatggcgcgacgtctgcagaaatttcatgaggaggtatcagtctagagttacccagggcctcgtggccggagaaactgcccagcagatctgtgaggacctcaggttgtgtataccttctacaggtcccctctgagccctctcaccttgtcctgtggaagaagcacaggctcctgtcctcagatcccgggaacgtcagcaacctctgccggctcctcgcttcctcgatccagaatccactctccagtctccctcccctgactccctctgctgtcctcccctctcaggagaataaagtgtgcaagcacgtgat

SEQ ID NO: 241 - DNA, 939 bp, Homo sapiens
  CDS (53)..(571)
ggccttgagccgcggcgccgagctacgggtgccgggtggagcgaagcacggaatgtgtctcctgctgggggccacgggcgtcgggaagacgctgctggtgaaacggctgcaggaggtgagctcccgggatgggaaaggcgacctgggggagccgcccccgacacggcccacggtgggcaccaatcttactgacatcgtggcacagagaaagatcaccatccgggagcttggggggtgcatgggccccatctggtccagttactatggaaactgccgttctctcctgtttgtgatggacgcctctgaccccacccagctctctgcatcctgtgtgcagctcttaggtctcctttctgcagaacaacttgcagaagcatcggtgctgatactcttcaataaaatcgacctaccctgttacatgtccacggaggagatgaagtcattaatcaggcttccagacatcattgcttgtgccaagcagaacatcaccacggcagaaatcagcgcccgtgaaggcactggcttagcaggggtgctggcctggctccaggccacccacagagccaacgattgactgcacggcagaggcgcagctggcctgagctggggagaggtggcagagggcagtatggctttgctgccaatagtttcttctcacaggggcagaataacccaaagtaaccctacatgatggggctctgtgctgagatgcaatgatgtgtaaactgaggcatgtggagatggaagttgacatctggcctctgaaaaaagtgtccccagggcaggatgggcacacggatcaacttggagccgggggacacgggccgggtcgaatgcgcacaggggaccgtctcaaaaacatggggcggcgcggatcagggggcaaccacagcggggaacaccgcgcaagccaaaaagcgaaagccccgggtgtgggcc

SEQ ID NO: 242 - DNA, 1482 bp, Homo sapiens
  CDS (393)..(998)
tttcgtggtggggttggcagggtgtgctggggcctggaggaggcgccgcgcggccagggagccagcgggaggccgcgcctggcaggtttctgaaacagatcgtgagcttcatcaagagaattcaactggaaaaccaagactggtagactctctttttcttcagacaataggcaggagccaggcagagtccagggattcttggaacacctatcttttcttcggaggacactaagttctatttgaagacaaagttcaatatggcaacaggactgatgggacacgaaggagtcgctaccgtgatttggtgacagttcttcaaaacgacagtgtctcaaggaaaggtggacctaggaactcctgaacttttgggttgccttaagtgagaaatcagcatggctcaggcaagtctcctggcttgtgaaggcctagcaggtgtgagtttggttcccactgcagccagcaagaagatgatgctgagccagattgccagcaagcaggccgagaatggcgagcgggcaggtagccctgatgtgctgaggtgctcgagtcagggtcaccgaaaagacagtgataagtcccggagccgcaaagatgatgacagcttgtctgaggcctctcattcaaaaaagactgttaaaaaggtggtggtagtggaacaaaatggttcttttcaagtaaagattcccaaaaattttgtttgtgaacactgctttggagcctttcggagcagttaccacctaaagaggcacatccttattcacactggtgagaagccatttgaatgcgatatatgtgatatgcgtttcatccagaagtaccacctggaacgccacaagcgtgtgcacagtggtgaaaagccttaccagtgtgaacggtgtcatcaggtaaggctcatccctgctacaataccccacacacacttttccttccccaagaatcagggccaccctccactcctgcctgacaaaagagccaccagcgttactcgccataatagttaacacatcggggtgaagtgcatctgtctggccttatgcagctgatcatggggagcagcaattagaacattgtaataataataataatagcattccatatcacttactctatgccaggcactgtgagagcatactttacatagatgattttatttaatcctcacattgactccctaaggtagctgtattgtccttatttcacgtatgggaaaattgagattcagagaagttaagtttcccagggacaccgcagatcacgaacagagctgggattcagtccaacttcagagctaatgcactttggaggaagagatacaatctttgccctgggggtcagtatctgatctgatgagaatgtaagagctggggccaaaacaagacaagaacaagagattagaaatgataatagctaacacttcctggatgcattgctaggtcccaagctttgctctgcactcttacactgaatcttcagacgctagaa

SEQ ID NO: 243 - DNA, 3647 bp, Homo sapiens
  CDS (144)..(2066)
gcctgcctgtgttactgaccaatgtggagctgggtctagggtgcgaagaactgcaatggctgctgcaacgggagcagctgagtccaccccaggtgcagcctggcttctgtctgtatctcagcaccaccctctccctctgtgccatggaaaaagtgctaggttgtgaactgctaaaggggctgaatgtgttggatctgggcctgaacatggaaatactggaagaacagatgctgcatgaaatcttgtgcagagagtatcctgaactcgagacccgctggcaggacctaaagatcagagccctagatacctgcaaggctgtggaggctgctgagggccagatccatccaacaaatgagtgtatgcaggagcggctgctgacgatgctgctgttccagaatccgaagcgtcagaagccagccaagtttctgcggaacatagtgagggcccaaggaaagctatgccagctgcgtgctcattgtgaagagttagaagggcagaaactacaggagatggtattgtgggcaccctatcgacctgtggtttggcatggaatggccatggtaaaggccctaagccaactgcagaacctgctgccacttttctgtatgagcccagagaactggctggcagtcactaagcaggctctggacagcatgaagccacgtgagattaatcacggggaggacctggccagccatctactgcaattgagagcacacctgacccgccagctgctgggcagcaccgtgactgcactgggccttacccaagtacccttggtgggtgcattgggcgctttggctctgctgcaagcaacagggaaagcatcagagctggaaagactggcactctggcctggactagcagcctctcccagcacagtccacagcaagccagtctcagatgtggctcgaccggcctggcttgggccaaaagcctggcatgaatgtgagatgttagagctgctgcccccatttgttggcctgtgtgcctccctggcaggccactccagtgcttggcaggcttacctgtcactgtcatccacagtgctgggtcctgcacctgggccagggcctgagccactcagcctcctccagaagctgatcctgtggcgcgttctgcgacctgagtgcctggcaggtgccctggcagacttcaccactagcctcctgggtcggcccctggatgaaaacacgtatgctcccaccatgccctttaaacatagtcaggctactcagcccatgctgatcttgttgccaccgcctggccacccctcagccactctgcatcctctgactgtcatccagaaactggctgccaagtatcagcaggggcagaagcaactgcaggtgatagccctgggctctgaagcctgggacccagtctcagttgtggtcagcactctatcccaggctatgtatgaggggcactggctggtgctggacaactgtcatctgatgccccattggccgaaagagctgctacagctcttgctggaactgttaggcagagccaaggtggttgcagacctggaatcagaacagcttttagaccaacctgaaagcaggaatgtaagcactgttcacagagattttcgtctttggcttattgtgcctgcagagtctagtgcttctttgccagctgtgctgactcagcactccatgcctgttttctggaaccagtccctggagctgggccatgttttgattgacagtgtggagctagcccagcaagtactctacatgcaaccccccacccaggcactacctctgctcctcctccatggcctcctgctacaccggcagctctatggaacaaggctgcaggcacacagggggcgctggagtcaagtgactctaacccaggttcttcagacccaagaccagctgtgggcaagtcttagcaatccccgtgctgccatgcaagagctggctggtgagacccttcctctcccccttggagtcatcagcccccaggagagcctggaagagggtgggggtgggatacaattcacagctttggttttggcggtggtggaaactgaaggtactggaactgagagactctaacctcatcttcagcttcagttttctacgggggtcctctgggggacactgaggacagggaggccctgattagcctcacacaagcctgcctgagccccagtagtgggagctgggtccagccacacacacctcagtctttgctggccacgctcatgcccctcccaggtaagcctcactcaggtatctgttttggggtagggaatagtgcaatgcaatgccaccccccacagaaatgtggacagcagtctcaataaaggtatatgagggggtaatattcatactgttatgggggtgatggcagtaaaggctcagaggaaggcctactctctcgagtctagggtggggagagtccatcttgtccctcacccctcacctctatccccaagagctaagggagctggatgcaatggcagagtgcaaggcccagatgcacctactgccctcaccacctgaaccccggctctgcggactgagtgagggcccccaagcctggctgttgcgacgccagagtcgcgctctcttgagtgcgctgcagcggagttcacccgtgtgggttcctgagtctcgaagaggcgcccagcttgcggaaaggcgactgcggcaacgcctagtgcaagtcaaccggaggctggagtcactgcaggatctgctgacccacgtgattcgccaagacgagtccgacgccccgtggtcagtgctggggccaaatgcacggcggcctctggagggcgtcttagagaccgaggctctagaactgagccagttggtgggcacgctacaacgcgaccttgattgcctgttgcagcagctgaagggcgcacccccgtgcccctcccgccgctgtgctgcggtggcccacgctctctggactggccgcctacccttgccttggcgacctcatgcgccggccggtccgcagccgccctggcactggctgcgacagttgtcgcgccgtgggcaactgttggttcgttacttgggcgtgggcgcggacgcgagcagtgatgtaccagagcgcgtcttccacctgtcagcctttcgccacccgcgccgcctgctgctggcattgcgtggggaagctgccctggaccagaatgtgcccagctcgaatttccctggtagccgaggctcggtctccagtcagctccagtataaacgtctggagatgaacagcaaccctctgcacttcagggtggagaatggtccaaatcccacggttccagagagagggctgctgctgatcgggctacaggtcctacatgcggagtgggacccaatagctggagccttgcaggacagtccttccagccaacccagccctctgcctcccgtcagcatcagcacacaggccccgggcaccagtgacctgccagccccagccgacctgactgtgtactcgtgtcctgtgtacatgggagggccccttggcaccgctaagctgcagagcaggaacatcgtgatgcatctgcctttacccaccaagctcacccccaacacctgtgtccaaaggagggtccatgtgtgcagcccacccctgtcttgagcccgtctaccaaaataaagttgtagtgattccatgaa

SEQ ID NO: 244 - DNA, 1512 bp, Homo sapiens
  CDS (88)..(1455)
gagtgaccacaggtgtccccgtcgtgctcacctgcaccggctgcgaggagcagggagctcctcaaagagctcaggaacggacaggacatggacacagtggtctttgaagacgtggttgtggatttcacgctggaggagtgggccttgctgaatcctgctcagagaaaactctacagagatgtcatgctggagaccttcaagcacctggcctcagtagataatgaggctcagcttaaagccagtgggtctatttctcagcaggatacttctggagaaaaattatccctcaaacagaaaatagaaaagttcacaagaaagaatatatgggcctcccttttaggaaaaaattgggaagaacatagcgttaaagacaagcacaacaccaaggagagacatttgagcagaaatccaagggtggagagaccatgtaaaagcagtaaaggtaataaacgtggaagaaccttcagaaagactcgaaattgtaatcgtcatctgcgcaagaattgttgtactagtgtaagacggtacgaatgcagtcagtgtggaaaactcttcacccattcctcatccctgataaggcacaaaagagctcactctggacaaaaattatataaatgtaaggaatgtgggaaagccttcagtcgcccttcctacctacagacgcatgagaaaactcacagtggagagaaaccctatgcctgtcaatcttgcgggaagacatttcttcgttcccactctctcactgaacatgtaaggactcacactggagagaaaccctacgaatgtgggcagtgtgggaaaggcttcagttgtcccaaatcctttcgcgcacatgtgatgatgcacgccggagggagaccgtatgagtgcaagcactgtgggaaagccttcaggtgtcagaaatcctttcgagtccatatgatcatgcacgccggagggagaccgtatgagtgcaagcagtgtgggaaagcctactgctgggcaacatcctttcaacgacacgtgagaattcacaacggggagaaaccctataagtgtggaaaatgcgggaaagcattcggttggccctcatccttacacaaacacgcgagaacgcatgctaaaaagaaacctgtgagtgggggcagcgtgggaaagtcttccgcgaggcctcgcccctccacagatgtcaaatcacaaactagagagaaagtctataaatgtgaaacgtgtgggaaaacgtatggttggtcctcatctttacacaaacatgagagaaagcacactggggagaaacctgtaaatgcagccagtgtgggaaaaccttcaggcgggctttgctcttccaaaaatgtaagaacgcagattggacagaagcccagtaaatgcgaaaaatgtgggaaagctttcagttgtcccaaagcctttcaaggtcatgtgagaagtcacacaggaaagaaatcctgtacatctaagtaatgggggaaaacctgtgcaaattaattcacatacatggttcagaaaattcacagc

SEQ ID NO: 245 - protein, 598 aa, Homo sapiens
MRDAGDPSPPNKMLRRSDSPENKYSDSTGHSKAKNVHTHRVRERDGGTSYSPQENSHNHSALHSSNSHSSNPSNNPSKTSDAPYDSADDWSEHISSSGKKYYYNCRTEVSQWEKPKEWLEREQRQKEANKMAVNSFPKDRDYRREVMQATATSGFASGMEDKHSSDASSLLPQNILSQTSRHNDRDYRLPRAETHSSSTPVQHPIKPVVHPTATPSTVPSSPFTLQSDHQPKKSFDANGASTLSKLPTPTSSVPAQKTERKESTSGDKPVSHSCTTPSTSSASGLNPTSAPPTSASAVPVSPVPQSPIPPLLQDPNLLRQLLPALQATLQLNNSNVDISKINEAAVTQASLQSIIHKFLTAGPSAFNITSLISQAAQLSTQAQPSNQSPMSLTSDASSPRSYVSPRISTPQTNTVPIKPLISTPPVSSQPKVSTPVVKQGPVSQSATQQPVTADKQQGHEPVSPRSLQRSSQRSPSPGPNHTSNSSNASNATVVPQNSSARSTCSLTPALAAHFSENLIKHVQGWPADHAEKQASRLREEAHNMGTIHMSEICTELKNLRSLVRVCEIQATLREQRILFLRQQIKELEKLKNQNSFMV

SEQ ID NO: 246 - protein, 351 aa, Homo sapiens
MGAKESRIGFLSYEEALRRVTDVELKRLKDAFKRTCGLSYYMGQHCFIREVLGDGVPPKVAEVIYCSFGGTSKGLHFNNLIVGLVLLTRGKDEEKAKYIFSLFSSESGNYVIREEMERMLHVVDGKVPDTLRKCFSEGEKVNYEKFRNWLFLNKDAFTFSRWLLSGGVYVTLTDDSDTPTFYQTLAGVTHLEESDIIDLEKRYWLLKAQSRTGRFDLETFGPLVSPPIRPSLSEGLFNAFDENRDNHIDFKEISCGLSACCRGPLAERQKFCFKVFDVDRDGVLSRVELRDMVVALLEVWKDNRTDDIPELHMDLSDIVEGILNAHDTTKDRGYEKKQLSKKLKLKLFPKE

SEQ ID NO: 247 - protein, 838 aa, Homo sapiens
MSEMISPSEKGSARMKKRSRNTLDSEVPAAYQTPKKSHQKSLSFSKTTPRRISHTPQTPLYTPERLQKSPAKMTPTKQAAFKESLKDSSSPGHDSPLDSKITPQKRHTQAGEGTSLETKTPRTPKRQGTQPPGFLPNCTWPHSVNSSPESPSCPAPPTSSTAQPRRECLTPIRDPLRTPPRAAAFMGTPQNQTHQQPHVLRAARAEEPAQKLKDKAIKTPKRPGNSTVTSSPPVTPKKLFTSPLCDVSKKSPFRKSKIECPSPGELDQKEPQMSPSVAASLSCPVPSTPPELSQRATLDTVPPPPPSKVGKRCRKTSDPRRSIVECQPDASATPGVGTADSPAAPTDSRDDQKGLSLSPQSPPERRGYPGPGLRSDWHASSPLLITSDTEHVTLLSEAEHHGIGDLKSNVLSVEEGEGLRTADAEKSSLSHPGIPPSPPSCGPGSPLMPSRDVHCTTDGRQCQASAQLDNLPASAWHSTDSASPQTYEVELEMQASGLPKLRIKKIDPSSSLEAEPLSKEESSLGEESFLPALSMPRASRSLSKPEPTYVSPPCPRLSHSTPGKSRGQTYICQACTPTHGPSSTPSPFQTDGVPWTPSPKHSGKTTPDIIKDWPRRKRAVGCGAGSSSGRGEVGADLPGSLSLLETEGKDHGLELSIHRTPILEDFELEGVCQLPDQSPPRNSMPKAEEASSWGQFGLSSRKRVLLAKEEADRGAKRICDLREDSEVSKSKEGSPSWSAWQLPSTGDEEVFVSGSTPPPSCAVRSCLSASALQALTQSPLLFQGKTPSSQSKDPRDEDVDVLPSTVEDSPFSRAFSRRRPISRTYTRKKLMGTWLEDL

SEQ ID NO: 248 - protein, 1944 aa, Homo sapiens
MSNFYEERTTMIAARDLQEFVPFGRDHCKHHPNALNLQLRQLQPASELWSSDGAAGLVGSLQEVTIHEKQKESWQLRKGVSEIGEDVDYDEELYVAGNMVIWSKGSKSQALAVYKAFTVDSPVQQALWCDFIISQDKSEKAYSSNEVEKCICILQSSCINMHSIEGKDYIASLPFQVANVWPTKYGLLFERSASSHEVPPGSPREPLPTMFSMLHPLDEITPLVCKSGSLFGSSRVQYVVDHAMKIVFLNTDPSIVMTYDAVQNVHSVWTLRRVKSEEENVVLKFSEQGGTPQNVATSSSLTAHLRSLSKGDSPVTSPFQNYSSIHSQSRSTSSPSLHSRSPSISNMAALSRAHSPALGVHSFSGVQRFNISSHNQSPKRHSISHSPNSNSNGSFLAPETEPIVPELCIDHLWTETITNIREKNSQASKVFITSDLCGQKFLCFLVESQLQLRCVKFQESNDKTQLIFGSVTNIPAKDAAPVEKIDTMLVLEGSGNLVLYTGVVRVGKVFIPGLPAPSLTMSNTMPRPSTPLDGVSTPKPLSKLLGSLDEVVLLSPVPELRDSSKLHDSLYNEDCTFQQLGTYIHSIRDPVHNRVTLELSNGSMVRITIPEIATSELVQTCLQAIKFILPKEIAVQMLVKWYNVHSAPGGPSYHSEWNLFVTCLMNMMGYNTDRLAWTRNFDFEGSLSPVIAPKKARPSETGSDDDWEYLLNSDYHQNVESHLLNRSLCLSPSEASQMKDEDFSQNLSLDSSTLLFTHIPAIFFVLHLVYEELKLNTLMGEGICSLVELLVQLARDLKLGPYVDHYYRDYPTLVRTTGQVCTIDPGQTGFMHHPSFFTSEPPSIYQWVSSCLKGEGMPPYPYLPGICERSRLVVLSIALYILGDESLVSDESSQYLTRITIAPQKLQVEQEENRFSFRHSTSVSSLAERLVVWMTNVGFTLRDLETLPFGIALPIRDAIYHCREQPASDWPEAVCLLIGRQDLSKQACEGNLPKGKSVLSSDVPSGTETEEEDDGMNDMNHEVMSLIWSEDLRVQDVRRLLQSAHPVRVNVVQYPELSDHEFIEEKENRLLQLCQRTMALPVGRGMFTLFSYHPVPTEPLPIPKLNLTGRAPPRNTTVDLNSGNIDVPPNMTSWASFHNGVAAGLKIAPASQIDSAWIVYNKPKHAELANEYAGFLMALGLNGHLTKLATLNIHDYLTKGHEMTSIGLLLGVSAAKLGTMDMSITRLLSIRIPALLPPTSTELDVPHNVQVAAVVGIGLVYQGTAHRHTAEVLLAEIGRPPGPEMEYCTDRKSYSLAAGLALGMVCLGHGSNLIGMSDLNVPEQLYQYMVGGHRRFQTGMHREKHKSPSYQIKEGDTINVDVTCPGATLALAMIYLKTNNRSIADWLRAPDTMYLLDFVKPEFLLLRTLARCLILWDDILPNSKWVDSNVPQIIRENSISLSEIELPCSEDLNLETLSQAHVYIIAGACLSLGFRFAGSENLSAFNCLHKFAKDFMTYLSAPNASVTGPHNLETCLSVVLLSLAMVMAGSGNLKVLQLCRFLHMKTGGEMNYGFHLAHHMALGLLFLGGGRYSLSTSNSSIAALLCALYPHFPAHSTDNRYHLQALRHLYVLAAEPRLLVPVDVDTNTPCYALLEVTYKGTQWYEQTKEELMAPTLLPELHLLKQIKVKGPRYWELLIDLSKGTQHLKSILSKDGVLYVKLRAGQLSYKEDPMGWQSLLAQTVANRNSEARAFKPETISAFTSDPALLSFAEYFCKPTVNMGQKQEILDLFSSVLYECVTQETPEMLPAYIAMDQAIRRLGRREMSETSELWQIKLVLEFFSSRSHQERLQNHPKRGLFMNSEFLPVVKCTIDNTLDQWLQVGGDMCVHAYLSGQPLEESQLSMLACFLVYHSVPAPQHLPPIGLEGSTSFAELLFKFKQLKMPVRALLRLAPLLLGNPQPMVM

SEQ ID NO: 249 - protein, 1250 aa, Homo sapiens
MEQLSDEEIDHGAEEDSDKEDQDLDKMFGAWLGELDKLTQSLDSDKPMEPVKRSPLRQETNMANFSYRFSIYNLNEALNQGETVDLDALMADLCSIEQELSSIGSGNSKRQITETKATQKLPVSRHTLKHGTLKGLSSSSNRIAKPSHASYSLDDVTAQLEQASLSMDEAAQQSVLEDTKPLVTNQHRRTASAGTVSDAEVHSISNSSHSSITSAASSMDSLDIDKVTRPQELDLTHQGQPITEEEQAAKLKAEKIRVALEKIKEAQVKKLVIRVHMSDDSSKTMMVDERQTVRQVLDNLMDKSHCGYSLDWSLVETVSELQMERIFEDHENLVENLLNWTRDSQNKLIFMERIEKYALFKNPQNYLLGKKETAEMADRNKEVLLEECFCGSSVTVPEIEGVLWLKDDGKKSWKKRYFLLRASGIYYVPKGKAKVSRDLVCFLQLDHVNVYYGQDYRNKYKAPTDYCLVLKHPQIQKKSQYIKYLCCDDVRTLHQWVNGIRIAKYGKQLYMNYQEALKRTESAYDWTSLSSSSIKSGSSSSSIPESQSNHSNQSDSGVSDTQPAGHVRSQSIVSSVFSEAWKRGTQLEESSKARMESMNRPYTSLVPPLSPQPKIVTPYTASQPSPPLPPPPPPPPPPPPPPPPPPPPLPSQSAPSAGSAAPMFVKYSTITRLQNASQHSGALFKPPTPPVMQSQSVKPQILVPPNGVVPPPPPPPPPPTPGSAMAQLKPAPCAPSLPQFSAPPPPLKIHQVQHITQVAPPTPPPPPPIPAPLPPQAPPKPLVTIPAPTSTKTVAPVVTQAAPPTPTPPVPPAKKQPAFPASYIPPSPPTPPVPVPPPTLPKQQSFCAKPPPSPLSPVPSVVKQIASQFPPPPTPPAMESQPLKPVPANVAPQSPPAVKAKPKWQPSSIPVPSPDFPPPPPESSLVFPPPPPSPVPAPPPPPPPTASPTPDKSGSPGKKTSKTSSPGGKKPPPTPQRNSSIKSSSGAEHPEPKRPSVDSLVSKFTPPAESGSPSKETLPPPAAPPKPGKLNLSGVNLPGVLQQGCVSAKAPVLSGRGKDSVVEFPSPPSDSDFPPPPPETDLPLPPIEIPAVFSGNTSPKVAVVNPQPQQWSKMSVKKAPPPTRPKRNDSTRLTQAEISEQPTMATVVPQVPTSPKSSLSVQPGFLADLNRTLQRKSITRHGSLSSRMSRAEPTATMDDMALPPPPPELLSDQQKAGYGGSHISGYATLRRGPPPAPPKRDQNTKLSRDW

SEQ ID NO: 250 - protein, 694 aa, Homo sapiens
MEWGYLLEVTSLLAALALLQRSSGAAAASAKELACQEITVPLCKGIGYNYTYMPNQFNHDTQDEAGLEVHQFWPLVEIQCSPDLKFFLCSMYTPICLEDYKKPLPPCRSVCERAKAGCAPLMRQYGFAWPDRMRCDRLPEQGNPDTLCMDYNRTDLTTAAPSPPRRLPPPPPGEQPPSGSGHGRPPGARPPHRGGGRGGGGGDAAAPPARGGGGGGKARPPGGGAAPCEPGCQCRAPMVSVSSERHPLYNRVKTGQIANCALPCHNPFFSQDERAFTVFWIGLWSVLCFVSTFATVSTFLIDMERFKYPERPIIFLSACYLFVSVGYLVRLVAGHEKVACSGGAPGAGGAGGAGGAAAGAGAAGAGAGGPGGRGEYEELGAVEQHVRYETTGPALCTVVFLLVYFFGMASSIWWVILSLTWFLAAGMKWGNEAIAGYSQYFHLAAWLVPSVKSIAVLALSSVDGDPVAGICYVGNQSLDNLRGFVLAPLVIYLFIGTMFLLAGFVSLFRIRSVIKQQDGPTKTHKLEKLMIRLGLFTVLYTVPAAVVVACLFYEQHNRPRWEATHNCPCLRDLQPDQARRPDYAVFMLKYFMCLVVGITSGVWVWSGKTLESWRSLCTRCCWASKGAAVGGGAGATAAGGGGGPGGGGGGGPGGGGGPGGGGGSLYSDVSTGLTWRSGTASSVSYPKQMPLSQV

SEQ ID NO: 251 - protein, 669 aa, Homo sapiens
MWTLVGRGWGCARALAPRATGAALLVAPGPRSAPTLGAAPESWATDRLYSSAEFKEKPDMSRFPVENIRNFSIVAHVDHGKSTLTDRLLELTGTIDKTKNNKQVLDKLQVERERGITVKAQTASLFYNCEGKQYLLNLIDTPGHVDFSYEVSRSLSACQGVLLVVDANEGIQAQTVANFFLAFEAQLSVIPVINKIDLKNADPERVENQIEKVFDIPSDECIKISAKLGTNVESVLQAIIERIPPPKVHRKNPLRALVFDSTFDQYRGVIANVALFDGVVSKGDKIVSAHTQKTYEVNEVGVLNPNEQPTHKLYAGQVGYLIAGMKDVTEAQIGDTLCLHKQPVEPLPGFKSAKPMVFAGMYPLDQSEYNNLKSAIEKLTLNDSSVTVHRDSSLALGAGWRLGFLGLLHMEVFNQRLEQEYNASVILTTPTVPYKAVLSSSKLIKEHREKEITIINPAQFPDKSKVTEYLEPVVLGTIITPDEYTGKIMMLCEARRAVQKNMIFIDQNRVMLKYLFPLNEIVVDFYDSLKSLSSGYASFDYEDAGYQTAELVKMDILLNGNTVEELVTVVHKDKAHSIGKAICERLKDSLPRQLFEIAIQAAIGSKIIARETVKAYRKNVLAKCYGGDITRKMKLLKRQAEGKKKLRKIGNVEVPKDAFIKVLKTQSSK

SEQ ID NO: 252 - protein, 171 aa, Homo sapiens
MASKRALVILAKGAEEMETVIPVDVMRRAGIKVTVAGLAGKDPVQCSRDVVICPDASLEDAKKEGPYDVVVLPGGNLGAQNLSESAAVKEILKEQENRKGLGSKVTTHPLAKDKMMNGGHYTYSENRVEKDGLILTSRGPGTSFEFALAIVEALNGKEVAAQVKAPLVLKD

SEQ ID NO: 253 - protein, 296 aa, Homo sapiens
MGGWAWPGTWPLAARDGGVAWRSRAGGAQTPLRRRGCGSRISGGMGRLSWQVAAAAAVGLALTLEALPWVLRWLRSRRRRPRREALFFPSQVTCTEALLRAPGAELAELPEGCPCGLPHGESALSRLLRALLAARASLDLCLFAFSSPQLGRAVQLLHQRGVRVRVVTDCDYMALNGSQIGLLRKAGIQVRHDQDPGYMHHKFAIVDKRVLITGSLNWTTQAIQNNRENVLITEDDEYVRLFLEEFERIWEQFNPTKYTFFPPKKSHGSCAPPVSRAGGRLLSWHRTCGTSSESQT

SEQ ID NO: 254 - protein, 387 aa, Homo sapiens
MSVAGLKKQFYKASQLVSEKVGGAEGTKLDDDFKEMEKKVDVTSKAVTEVLARTIEYLQPNPASRAKLTMLNTVSKIRGQVKNPGYPQSEGLLGECMIRHGKELGGESNFGDALLDAGESMKRLAEVKDSLDIEVKQNFIDPLQNLCEKDLKEIQHHLKKLEGRRLDFDYKKKRQGKIPDEELRQALEKFEESKEVAETSMHNLLETDIEQVSQLSALVDAQLDYHRQAVQILDELAEKLKRRMREASSRPKREYKPKPREPFDLGEPEQSNGGFPCTTAPKIAEGALPDRFEPTASSFCLCLASSSFRSSDKPIRTPSRSMPPLDQPSCKALYDFEPENDGELGFHEGDVITLTNQIDENWYEGMLDGQSGFFPLSYVEVLVPLPQ

SEQ ID NO: 255 - protein, 140 aa, Homo sapiens
MDVFMKGLSKAKEGVVAAAEKTKQGVAEAAGKTKEGVLYVGSKTKEGVVHGVATVAEKTKEQVTNVGGAVVTGVTAVAQKTVEGAGSIAAATGFVKKDQLGKYEEGPPQEDFVKYMPVSPHYEVYEALSEKGSQVCAPNA

SEQ ID NO: 256 - protein, 707 aa, Homo sapiens
MPTVVGQAAPGTGTGSVQGCGWTRHTAGRFHCGHWEHGGTRKLGDTRNRRAPKRMSQPWLREPLGLGSPKGRSSSLLLVAHNVADIQVEQNRQHFYELSLEYVCKLQEIQERKKFEFVEPMLSFFQGMFTFYHQGHELAKDFNHYKMELQINIQNTRNRFEGTRSEVEELMNKIRQNPKDHKRASQFTAEGYLYVQEKRPAPFGSSWVKHYCMYRKAAKKFNMIPFEHRSGGKLGDGEVFFLKECTKRHTDSIDRRFCFDIEAADRPGVSLTMQAFSEEERKQWLEALGGKEALSHSFNTAIIPRPEGNAQLDKMGFTIIRKCISAVETRGINDQGLYRVVGVSSKVQRLLSMLMDVKTCNEVDLENSADWEVKTITSALKQYLRSLPEPLMTYELHGDFIVPAKSGSPESRVNAIHFLVHKLPEKNKEMLDILVKHLTNVSNHSKQNLMTVANLGVVFGPTLMRPQEETVAALMDLKFQNIVVEILIENHEKIFRTPPDTTFPEPTCLSASPPNAPPRQSKRQGQRTKRPVAVYNLCLELEDGDNPYPSKEDTPTSSLDSLSSPSPVTTAVPGPPGPDKNHLLADGGSFGDWASTIPGQTRSSMVQWLNPQSPTTTSSNSAVTPLSPGSSPFPFSPPATVADKPPESIRSRKARAVYPCEAEHSSELSFEIGAIFEDVQTSREPGWLEGTLNGKRGLIPQNYVKLL

SEQ ID NO: 257 - protein, 155 aa, Homo sapiens
MASKRALVILAKGAEEMETVIPVDVMRRAGGPYDVVVLPGGNLGAQNLSESAAVKEILKEQENRKGLIAAICAGPTALLAHEIGFGSKVTTHPLAKDKMMNGGHYTYSENRVEKDGLILTSRGPGTSFEFALAIVEALNGKEVAAQVKAPLVLKD

SEQ ID NO: 258 - protein, 468 aa, Homo sapiens
MKSRQKGKKKGSAKERVFGCDLQEHLQHSGQEVPQVLKSCAEFVEEYGVVDGIYRLSGVSSNIQKLRQEFESERKPDLRRDVYLQDIHCVSSLCKAYFRELPDPLLTYRLYDKFAEAVGVQLEPERLVKILEVLRELPVPNYRTLEFLMRHLVHMASFSAQTNMHARNLAIVWAPNLLRSKDIEASGFNGTAAFMEVRVQSIVVEFILTHVDQLFGGAALSGGEVESGWRSLPGTRASGSPEDLMPRPLPYHLPSILQAGDGPPQMRPYHTIIEIAEHKRKGSLKVRKWRSIFNLGRSGHETKRKLPRGAEDREDKSNKGTLRPAKSMDSLSAAAGASDEPEGLVGPSSPRPSPLLPESLENDSIEAAEGEQEPEAEALGGTNSEPGTPRAGRSAIRAGGSSRAERCAGVHISDPLPPVTMCKRGPVQISLGSPFSFGITCSYFRKGKWCHSGPGTASPARLGPQVPL

SEQ ID NO: 259 - protein, 1118 aa, Homo sapiens
MEPSRALLGCLASAAAAAPPGEDGAGAGAEEEEEEEEEAAAAVGPGELGCDAPLPYWTAVFEYEAAGEDELTLRLGDVVEVLSKDSQVSGDEGWWTGQLNQRVGIFPSNYVTPRSAFSSRCQPGGEDPSCYPPIQLLEIDFAELTLEEIIGIGGFGKVYRAFWIGDEVAVKAARHDPDEDISQTIENVRQEAKLFAMLKHPNIIALRGVCLKEPNLCLVMEFARGGPLNRVLSGKRIPPDILVNWAVQIARGMNYLHDEAIVPIIHRDLKSSNILILQKVENGDLSNKILKITDFGLAREWHRTTKMSAAGTYAWMAPEVIRASMFSKGSDVWSYGVLLWELLTGEVPFRGIDGLAVAYGVAMNKLALPIPSTCPEPFAKLMEDCWNPDPHSRPSFTNILDQLTTIEESGFFEMPKDSFHCLQDNWKHEIQEMFDQLRAKEKELRTWEEELTRAALQQKNQEELLRRREQELAEREIDILERELNIIIHQLCQEKPRVKKRKGKFRKSRLKLKDGNRISLPSDFQHKFTVQASPTMDKRKSLINSRSSPPASPTIIPRLRAIQLTPGESSKTWGRSSVVPKEEGEEEEKRAPKKKGRTWGPGTLGQKELASGDEGSPQRREKANGLSTPSESPHFHLGLKSLVDGYKQWSSSAPNLVKGPRSSPALPGFTSLMEMALLAASWVVPIDIEEDEDSEGPGSGESRLQHSPSQSYLCIPFPRGEDGDGPSSDGIHEEPTPVNSATSTPQLTPTNSLKRGGAHHRRCEVALLGCGAVLAATGLGFDLLEAGKCQLLPLEEPEPPAREEKKRREGLFQRSSRPRRSTSPPSRKLFKKEEPMLLLGDPSASLTLLSLSSISECNSTRSLLRSDSDEIVVYEMPVSPVEAPPLSPCTHNPLVNVRVERFKRDPNQSLTPTHVTLTTPSQPSSHRRTPSDGALKPETLLASRSPSSNGLSPSPGAGMLKTPSPSRDPGEFPRLPDPNVVFPPTPRRWNTQQDSTLERPKTLEFLPRPRPSANRQRLDPWWFVSPSHARSTSPANSSSTETPSNLDSCFASSSSTVEERPGLPALLPFQAGPLPPTERTLLDLDAEGQSQDSTVPLCRAELNTHRPAPYEIQQEFWS

SEQ ID NO: 260 - protein, 945 aa, Homo sapiens
MVFQTRYPSWIILCYIWLLRFAHTGEAQAAKEVLLLDSKAQQTELEWISSPPNGWEEISGLDENYTPIRTYQVCQVMEPNQNNWLRTNWISKGNAQRIFVELKFTLRDCNSLPGVLGTCKETFNLYYYETDYDTGRNIRENLYVKIDTIAADESFTQGDLGERKMKLNTEVREIGPLSKKGFYLAFQDVGACIALVSVKVYYKKCWSIIENLAIFPDTVTGSEFSSLVEVRGTCVSSAEEEAENAPRMHCSAEGEWLVPIGKCICKAGYQQKGDTCEPCGRGFYKSSSQDLQCSRCPTHSFSDKEGSSRCECEDGYYRAPSDPPYVACTRPPSAPQNLIFNINQTTVSLEWSPPADNGGRNDVTYRILCKRCSWEQGECVPCGSNIGYMPQQTGLEDNYVTVMDLLAHANYTFEVEAVNGVSDLSRSQRLFAAVSITTGQAAPSQVSGVMKERVLQRSVELSWQEPEHPNGVITEYEIKYYEKDQRERTYSTVKTKSTSASINNLKPGTVYVFQIRAFTAAGYGNYSPRLDVATLEEATGKMFEATAVSSEQNPVIIIAVVAVAGTIILVFMVFGFIIGRRHCGYSKADQEGDEELYFHFKFPGTKTYIDPETYEDPNRAVHQFAKELDASCIKIERVIGAGEFGEVCSGRLKLPGKRDVAVAIKTLKVGYTEKQRRDFLCEASIMGQFDHPNVVHLEGVVTRGKPVMIVIEFMENGALDAFLRKHDGQFTVIQLVGMLRGIAAGMRYLADMGYVHRDLAARNILVNSNLVCKVSDFGLSRVIEDDPEAVYTTTGGKIPVRWTAPEAIQYRKFTSASDVWSYGIVMWEVMSYGERPYWDMSNQDDNVRFSVSFLSRPISPLLDQNTPDFTTFCSVGEWLQAIKMERYKDNFTAAGYNSLESVARMTIEDVMSLGITLVGHQKKIMSSIQTMRAQMLHLHGTGIQV

SEQ ID NO: 261 - protein, 217 aa, Homo sapiens
MSLRLDTTPSCNSARPLHALQVLLLLSLLLTALASSTKGQTKRNLAKGKEESLDSDLYAELRCMCIKTTSGIHPKNIQSLEVIGKGTHCNQVEVIATLKDGRKICLDPDAPRIKKIVQKKLAEPKSSQYYLSFRTAVPRCPLQASGLEGQPGIKRAGEAQESLATETQPEFPIALSTEILLEALPQHELRSRVLRLTPRAAVPGVAAPATCGRLRQR

SEQ ID NO: 262 - protein, 194 aa, Homo sapiens
MPNVLLPPKESNLFKRILKCYEQKQYKNGLKFCKMILSNPKFAEHGETLAMKGLTLNCLGKKEEAYEFVRKGLRNDVKSHVCWHVYGLLQRSDKKYDEAIKCYRNALKLDKDNLQILRDLSLLQIQMRDLEGYRETRYQLLQLRPTQRASWIGYAIAYHLLKDYDMALNSSKRNPVHVWGTTGNPWWVHKRSFR

SEQ ID NO: 263 - protein, 174 aa, Homo sapiens
MLDSCKLKSACNLPFICNKKIINTAGTSNAEVPLADPGMYQLDITLRRGQSLAARDRGGTSDPYVKFKIGGKEVFRSKIIHKNLNPVWEEKACILVDHLREPLYIKVFDYDFGLQDDFMGSAFLDLTQLELNRPTDVTLTLKDPHYPDHDLGIILLSVILTPKEGESSGCDNAT

SEQ ID NO: 264 - protein, 323 aa, Homo sapiens
MNNPIPSNLKSEAKKAAKILREFTEITSRNGPDKIIPAHVIAKAKGLAILSVIKAGFLVTARGGSGIVVARLPDGKWSAPSAIGIAGLGGGFEIGIEVSDLVIILNYDRAVEAFAKGGNLTLGGNLTVAVGPLGRNLEGNVALRSSAAVFTYCKSRGLFAGVSLEGSCLIERKETNRKFYCQDIRAYDILFGDTPRPAQAEDLYEILDSFTEKYENEGQRINARKAAREQRKSSAKELPPKPLSRPQQSSAPVQLNSGSQSNLNQPIEVTALYSFEGQQPGDLNFQAGDRITVISKTDSHFDWWEGKLRGQTGIFPANYVTMN

SEQ ID NO: 265 - protein, 610 aa, Homo sapiens [sequence omitted]

SEQ ID NO: 266 - protein, 686 aa, Homo sapiens
MVAEESGPGAQNSPYQLRRKTLLPKRTACPTKNSMEGASTSTTENFGHRAKRARVSGKSQDLSAAPAEQYLQEKLPDEVVLKIFSYLLEQDLCRAACVCKRFSELANDPILWKRLYMEVFEYTRPMMHPEPGKFYQINPEEYEHPNPWKESFQQLYKGAHVKPGFAEHFYSNPARYKGRENMLYYDTIEDALGGVQEAHFDGLIFVHSGIYTDEWIYIESPITMIGAAPGKVADKVIIENTRDSTFVFMEGSEDAYVGYMTIRFNPDDKSAQHHNAHHCLEITVNCSPIIDHCIIRSTCTVGSAVCVSGQGACPTIKHCNISDCENVGLYITDHAQGIYEDNEISNNALAGIWVKNHGNPIIRRNHIHHGRDVGVFTFDHGMGYFESCNIHRNRIAGFEVKAYANPTVVRCEIHHGQTGGIYVHEKGRGQFIENKIYANNFAGVWITSNSDPTIRGNSIFNGNQGGVYIFGDGRGLIEGNDIYGNALAGIQIRTNSCPIVRHNKIHDGQHGGIYVHEKGQGVIEENEVYSNTLAGVWVTTGSTPVLRRNRIHSGKQVGVYFYDNGHGVLEDNDIYNHMYSGVQIRTGSNPKIRRNKIWGGQNGGILVYNSGLGCIEDNEIFDNAMAGVWIKTDSNPTLRRNKIHDGRDGGICIFNGGRGIVVNFALVKNPVFHYSSISLMINDIAN

SEQ ID NO: 267 - protein, 795 aa, Homo sapiens
MPQVTALLVEDKNLGRADAMLEQLLPELTGLLSLLDHEYLSDTTLEKKMAVASILQSLQPLPAGMSPFFLTAKEVSYLYVNTADLHSGPSFVESLFEEFDCDLSDLRDMPEDDGEPSKGASPELAKSPRLRNAADLPPPLPNKPPPEDYYEEALPLGPGKSPEYISSHNGCSPSHSIVDGYYEDADSSYPATRVNGELKSSYNDSDAMSSSYESYDEEEEEGKSPQPRHQWPSEEASMHLVRECRICAFLLRKKRFGQWAKQLTVIREDQLLCYKSSKDRQPHLRLALDTCSIIYVPKDSRHKRHELRFTQGATEVLVLALQSREQAEEWLKVIREVSKPVGGAEGVEVPRSPVLLCKLDLDKRLSQEKQTSDSDSVGVGDNCSTLGRRETCDHGKGKKSSLAELKGSMSRAAGRKITRIIGFSKKKTLADDLQTSSTEEEVPCCGYLNVLVNQGWKERWCRLKCNTLYFHKDHMDLRTHVNAIALQGCEVAPGFGPRHPFAFRILRNRQEVAILEASCSEDMGRWLGLLLVEMGSRVTPEALHYDYVDVETLTSIVSAGRNSFLYARSCQNQWPEPRVYDDVPYEKMQDEEPERPTGAQVKRHASSCSEKSHRVDPQVKVKRHASSANQYKYGKNRAEEDARRYLVEKEKLEKEKETIRTELIALRQEKRELKEAIRSSPGTYVGAKLKALEEAVATLEAQCRAKEERRIDLELKLVAVKERLQQSLAGGPALGLSVSSKPKSGETANKPQNSVPEQPLPVNCVSELRKRSPSIVASNQGRVLQKAKEWEMKKT

SEQ ID NO: 268 - protein, 409 aa, Homo sapiens [sequence omitted]

SEQ ID NO: 269 - protein, 599 aa, Homo sapiens
MSGPCGEKPVLEASPTMSLWEFEDSHSRQGTPRPGQELAAEEASALELQMKVDFFRKLGYSSTEIHSVLQKLGVQADTNTVLGELVKHGTATERERQTSPDPCPQLPLVPRGGGTPKAPNLEPPLPEEEKEGSDLRPVVIDGSNVAMSHGNKEVFSCRGILLAVNWFLERGHTDITVFVPSWRKEQPRPDVPITDQHILRELEKKKILVFTPSRRVGGKRVVCYDDRFIVKLAYESDGIVVSNDTYRDLQGERQEWKRFIEERLLMYSFVNDKFMPPDDPLGRHGPSLDNFLRKKPLTLEHRKQPCPYGRKCTYGIKCRFFHPERPSCPQRSVADELRANALLSPPRAPSKDKNGRRPSPSSQSSSLLTESEQCSLDGKKLGAQASPGSRQEGLTQTYAPSGRSLAPSGGSGSSFGPTDWLPQTLDSLPYVSQDCLDSGIGSLESQMSELWGVRGGGPGEPGPPRAPYTGYSPYGSELPATAAFSAFGRAMGAGHFSVPADYPPAPPAFPPREYWSEPYPLPPPTSVLQEPPVQSPGAGRSPWGRAGSLAKEQASVYTKLCGVFPPHLVEAVMGRFPQLLDPQQLAAEILSYKSQHPSE

SEQ ID NO: 270 - protein, 1351 aa, Homo sapiens
MENKETLKGLHKMDDRPEERMIREKLKATCMPAWKHEWLERRNRRGPVVVKPIPVKGDGSEMNHLAAESPGEVQASAASPASKGPTQSFSCNSPSGRTVKSESPGVRRKRVSPVPFQSGRITPPRRAPSPDGFSPYSPEETNRRVNKVMRARLYLLQQIGPNSFLIGGDSPDNKYRVFIGPQNCSCAHGTFCIHLLFVMLRVFQLEPSDPMLWRKTLKNFEVESLFQKYHSRRSSRIKAPSRNTIQKFVSRMSNSHTLSSSSTSTSSSENSIKDEEEQMCPICLLGMLDEESLTVCEDGCRNKLHHHCMSIWAEECRRNREPLICPLCRSKWRSHDFYSHELSSPVDSPSSLRAAQQQTVQQQPLAGSRRNQESNFNLTHYGTQQIPPAYKDLAEPWIQVFGMELVGCLFSRNWNVREMALRRLSHDVSGALLLANGESTGNSGGSSGSSPSGGATSGSSQTSISGDVVEACCSVLSMVCADPVYKVYVAALKTLRAMLVYTPCHSLAERIKLQRLLQPVVDTILVKCADANSRTSQLSISTLLELCKGQAGELAVGREILKAGSIGIGGVDYVLNCILGNQTESNNWQELLGRLCLIDRLLLEFPAEFYPHIVSTDVSQAEPVEIRYKKLLSLLTFALQSINNSHSMVGKLSRRIYLSSARMVTTVPHVFSKLLEMLSVSSVSTHFTRMRRRLMAYADEVEIAEAIQLGVEDTLQRQQHNSFCRHLFPTTIWKPQRTVPLECTVHLEKTGKGLCATKLSASSEDISERLARISVGPSSSTTTTTTTTEQPKPMVQTKGRPHSQCLNSSPLSHHSQLMFPALSTPSSSTPSVPAGTATDVSKHRLQGFIPCRIPSASPQTQRKFSLQFHRNCPENKDSDKLSPVFTQSRPLPSSNIHRPKPSRPTPGNTSKQGDPSKNSMTLDLNSSSKCDDSFGLSSNSSNCCYTSDETVFTPVEEKCRLDVNTELNSSIEDLLEASMPSSDTTVTFKSEVAVLSPEKAENDDTYKDDVNHNQKCKEKMEAEEEEALAIAMAMSASQVALPIVPQLQVENGEDIIIIQQDTPETLPGHTKAKQPYREDTEWLKGQQIGLGAFSSCYQAQDVGTGTLMAVKQVTYVRNTSSEQEEVVEALREEIRMMSHLNHPNIIRMLGATCEKSNYNLFIEWMAGGSVAHLLSKYGAFKESVVINYTEQLLRGLSYLHENQIIHRDVKGANLLIDSTGQRLRIADFGAAARLASKGTGAGEFQGQLLGTIAFMAPEVLRGQQYGRSCDVWSVGCAIIEMACAKPPWNAEKHSNHLALIFKIASATTAPSIPSHLSPGLRDVALRCLELQPQDRPPSRELLKHPVFRTTW

SEQ ID NO: 271 - protein, 750 aa, Homo sapiens
MAGGPGPGEPAAPGAQHFLYEVPPWVMCRFYKVMDALEPADWCQFAALIVRDQTELRLCERSGQRTASVLWPWINRNARVADLVHILTHLQLLRARDIITACTTAPRPSSIPAPAEAEAWSPRKLPSSASTFLSPAFPGSQTHSGPELGLVPSPASLWPPPPSPAPSSTKPGPESSVSLLQGARPFPFCWPLCEISRGTHNFSEELKIGEGGFGCVYRAVMRNTVYAVKRLKEPSFWRRVPGPLVVLGLGWHWWPEGLRFESLTLPVFPAPSPTAPWGLQNADLEWTAVKQSFLTEVEQLSRFRHPNIVDFAGYCAQNGFYCLVYGFLPNGSLEDRLHCQRLDILLGTARAIQFLHQDSPSLIHGDIKSSNVLLDERLTPKLGDFGLARFSRFAGSSPSQSSMVARTQTVRGTLAYLPEEYIKTGRLAVDTDTFSFGVVVLETLAGQRAVKTHGARTKYLKDLVEEEAEEAGVALRSTQSTLQAGLAADAWAAPIAMQIYKKHLDPRPGPCPPELGLGLGQLACCCLHRRAKRRPPMTQVYERLEKLQAVVAGVPGHSEAASCIPPSPQENSYVSSTGRAHSGAAPWQPLAAPSGASAQAAEQLQRGPNQPVESDESLGGLSAALRSWHLTPSCPLDPAPLREAGCPQGDTAGESSWGSGPGSRPTAVEGLALGSSASSSSEPPQIIINPARQKMVQKLALYEDGALDSLQLLSSSSLPGNRKPQQEFSIPGLGLEQDRQGPEESDEFQS

SEQ ID NO: 272 - protein, 1526 aa, Homo sapiens
MLSRVGAQTAGGPQEAGPGSLASTYQARPRHVPSDSRLRHVRGSAQPPPPLLRATGVFPPSLRFPGSAAGAPLGPDFFRLFTSDMSGDPRTTSPGQLLHQGEQDVAALAFVGTLGGDRAPSQTWHRPEPSPFPLPGILVASLSLSAASSIVPLGEVGGDLNPQRLPLRYCSKSEEIQTPGRAQADGTRGGGAGRRGGHFYARGHEPWQECAAAAVAAPWGLGCVYLHKRARAVRAGWIRRDLTAPLSRGGEEEVASGRDCSIPGKRDRTRGGESGQSATREDLRCRSGIRSSAGLPPGCSRRRGKGATGREDLLPLCPVVGSTGGRPVGRASPRRSGTVGEALEKDIKTSYIMDHMISDGFLTISEEEKVRNEPTQQQRAAMLIKMILKKDNDSYVSFYNALLHEGYKDLAALLHDGIPVVSSSSVRTVLCEGGVPQRPVVFVTRKKLVNAIQQKLSKLKGEPGWVTIHGMAGCGKSVLAAEAVRDHSLLEGCFPGGVHWVSVGKQDKSGLLMKLQNLCTRLDQDESFSQRLPLNIEEAKDRLRILMLRKHPRSLLILDDVWDSWVLKAFDSQCQILLTTRDKSVTDSVMGPKYVVPVESSLGKEKGLEILSLFVNMKKADLPEQAHSIIKECKVSLIGALLRDFPNRWEYYLKQLQNKQFKRIRKSSSYDYEALDEAMSISVEMLREDIKDYYTDLSILQKDVKVPTKDLHKKIITQFQRYHQPHTLSPDQEDCMYWYNFLAYHMASAKMHKELCALMFSLDWIKAKTELVGPAHLIHEFVEYRHILDEKPFPNIVQLGLCEPETSEVYQQAKLQAKQEVDNGMLYLEWINKKNITNLSRLVVRPHTDAVYHACFSEDGQRIASCGADKTLQLQARASGSTEQAGPLPPGAAVAAQAVAADSGIPVLLGDLEGPPALVFKAETGEKLLEIKAHEDEVLCCAFSTDDRFIATCSVDKKVKIWNSMTGELVHTYDEHSEQVNCCHFTNSSHHLLLATGSSDCFLKLWDLNQKECRNTMFGHTNSVNHCRFSPDDKLLASCSADGTLKLWDATSANERKSINVKQFFLNLEDPQEDMEVIVKCCSWSADGARIMVAAKNKIFLFDIHTSGLLGEIHTGHHSTIQYCDFSPQNHLAVVALSQYCVELWNTDSRSKVADCRGHLSWVHGVMFSPDGSSFLTSSDDQTIRLWETKKVCKNSAVMLKQEVDVVFQENEVMVLAVDHIRRLQLINGRTGQIDYLTEAQVSCCCLSPHLQYIAFGDENGAIEILELVNNRIFQSRFQHKKTVWHIQFTADEKTLISSSDDAEIQVWNWQLDKCIFLRGHQETVKDFRLLKNSRLLSWSFDGTVKVWNIITGNKEKDFVCHQGTVLSCDISHDATKFSSTSADKTAKIWSFDLLLPLHELRGHNGCVRCSAFSVDSTLLATGDDNGEIRIWNVSNGELLHLCAPLSEEGAATHGGWVTDLCFSPDGKMLISAGGYIKWWNVVTGESSQTFYTNGTNLKKIHVSPDFKTYVTVDNLGILYILQTLE

SEQ ID NO: 273 - protein, 1199 aa, Homo sapiens
MDAKARNCLLQHREALEKDIKTSYIMDHMISDGFLTISEEEKVRNEPTQQQRAAMLIKMILKKDNDSYVSFYNALLHEGYKDLAALLHDGIPVVSSSSVRTVLCEGGVPQRPVVFVTRKKLVNAIQQKLSKLKGEPGWVTIHGMAGCGKSVLAAEAVRDHSLLEGCFPGGVHWVSVGKQDKSGLLMKLQNLCTRLDQDESFSQRLPLNIEEAKDRLRILMLRKHPRSLLILDDVWDSWVLKAFDSQCQILLTTRDKSVTDSVMGPKYVVPVESSLGKEKGLEILSLFVNMKKADLPEQAHSIIKECKVSLIGALLRDFPNRWEYYLKQLQNKQFKRIRKSSSYDYEALDEAMSISVEMLREDIKDYYTDLSILQKDVKVPTKDLHKKIITQFQRYHQPHTLSPDQEDCMYWYNFLAYHMASAKMHKELCALMFSLDWIKAKTELVGPAHLIHEFVEYRHILDEKPFPNIVQLGLCEPETSEVYQQAKLQAKQEVDNGMLYLEWINKKNITNLSRLVVRPHTDAVYHACFSEDGQRIASCGADKTLQLQARASGSTEQAGPLPPGAAVAAQAVAADSGIPVLLGDLEGPPALVFKAETGEKLLEIKAHEDEVLCCAFSTDDRFIATCSVDKKVKIWNSMTGELVHTYDEHSEQVNCCHFTNSSHHLLLATGSSDCFLKLWDLNQKECRNTMFGHTNSVNHCRFSPDDKLLASCSADGTLKLWDATSANERKSINVKQFFLNLEDPQEDMEVIVKCCSWSADGARIMVAAKNKIFLFDIHTSGLLGEIHTGHHSTIQYCDFSPQNHLAVVALSQYCVELWNTDSRSKVADCRGHLSWVHGVMFSPDGSSFLTSSDDQTIRLWETKKVCKNSAVMLKQEVDVVFQENEVMVLAVDHIRRLQLINGRTGQIDYLTEAQVSCCCLSPHLQYIAFGDENGAIEILELVNNRIFQSRFQHKKTVWHIQFTADEKTLISSSDDAEIQVWNWQLDKCIFLRGHQETVKDFRLLKNSRLLSWSFDGTVKVWNIITGNKEKDFVCHQGTVLSCDISHDATKFSSTSADKTAKIWSFDLLLPLHELRGHNGCVRCSAFSVDSTLLATGDDNGEIRIWNVSNGELLHLCAPLSEEGAATHGGWVTDLCFSPDGKMLISAGGYIKWWNVVTGESSQTFYTNGTNLKKIHVSPDFKTYVTVDNLGILYILQTLE

SEQ ID NO: 274 - protein, 86 aa, Homo sapiens
MSHTILLVQPTKRPEGRTYADYESVNECMEGVCKMYEEHLDFIDDLADLSCLVYRADTQTYQPYNKDWIKEKIYVLLRRQAQQAGK

SEQ ID NO: 275 - protein, 669 aa, Homo sapiens [sequence omitted]

SEQ ID NO: 276 - protein, 288 aa, Homo sapiens
MSAFEKPQIIAHIQKGFNYTVFDCKWVPCSAKFVTMGNFARGTGVIQLYEIQHGDLKLLREIEKAKPIKCGTFGATSLQQRYLATGDFGGNLHIWNLEAPEMPVYSVKGHKEIINAIDGIGGLGIGEGAPEIVTGSRDGTVKVWDPRQKDDPVANMEPVQGENKRDCWTVAFGNAYNQEERVVCAGYDNGDIKLFDLRNMALRWETNIKNGVCSLEFDRKDISMNKLVATSLEGKFHVFDMRTQHPTKGFASVSEKAHKSTVWQVRHLPQNRELFLTAGGAGGLHLWK

SEQ ID NO: 277 - protein, 499 aa, Homo sapiens
MVSIHSLSELERLKLQETAYHELVARHFLSEFKPDRALPIDRPNTLDKWFLILRGQQRAVSHKTFGISLEEVLVNEFTRRKHLELTATMQVEEATGQAAGRRRGNVVRRVFGRIRRFFSRRRNEPTLPREFTRRGRRGAVSVDSLAELEDGALLLQTLQLSKISFPIGQRLLGSKRKMSLNPIAKQIPQVVEACCQFIEKHGLSAVGIFTLEYSVQRVRQLREEFDQGLDVVLDDNQNVHDVAALLKEFFRDMKDSLLPDDLYMSFLLTATLKPQDQLSALQLLVYLMPPCHSDTLERLLKALHKITENCEDSIGIDGQLVPGNRMTSTNLALVFGSALLKKGKFGKRESRKTKLGIDHYVASVNVVRAMIDNWDVLFQVPPHIQRQVAKRVWKSSPEALDFIRRRNLRKIQSARIKMEEDALLSDPVETSAEARAAVLAQSKPSDEGSSEEPAVPSGTARSHDDEEGAGNPPIPEQDRPLLRVPREKEAKTGVSYFFP

SEQ ID NO: 278 - protein, 203 aa, Homo sapiens
MVSTYRVAVLGARGVGKSAIVRQFLYNEFSEVCVPTTARRLYLPAVVMNGHVHDLQILDFPPISAFPVNTLQEWADTCCRGLRSVHAYILVYDICCFDSFEYVKTIRQQILETRVIGTSETPIIIVGNKRDLQRGRVIPRWNVSHLVRKTWKCGYVECSAKYNWHILLLFSELLKSVGCARCKHVHAALRFQGALRRNRCAIM

SEQ ID NO: 279 - protein, 205 aa, Homo sapiens
MEGLSDVASFATKLKNTLIQYHSIEEDKWRVAKKTKDVTVWRKPSEEFNGYLYKAQGVIDDLVYSIIDHIRPGPCRLDWDSLMTSLDILENFEENCCVMRYTTAGQLWNIISPREFVDFSYTVGYKEGLLSCGISLDWDEKRPEFVRGYNHPCGWFCVPLKDNPNQSLLTGYIQTDLRGMIPQSAVDTAMASTLTNFYGDLRKAL

SEQ ID NO: 280 - protein, 900 aa, Homo sapiens
MENRYQDLEKNFTTKQQLCLNAIRVFTSMAATQLSVTVTVLGIPQFQSVLKAVPARGEPQQDCCVKTELLGEETPMAADEGSAEKQAGEAHMAADGETNGSCENSDASSHANAAKHTQDSARVNPQDGTNTLTRIAENGVSERDSEAAKQNHVTADDFVQTSVIGSNGYILNKPALQAQPLRTTSTLASSLPGHAAKTLPGGAGKGRTPSAFPQTPAAPPATLGEGSADTEDRKLPAPGADVKVHRARKTMPKSVVGLHAASKDPREVREARDHKEPKEEINKNISDFGRQQLLPPFPSLHQSLPQNQCYMATTKSQTACLPFVLAAAVSRKKKRRMGTYSLVPKKKTKVLKQRTVIEMFKSITHSTVGSKGEKDLGASSLHVNGESLEMDSDEDDSEELEEDDGHGAEQAAAFPTEDSRTSKESMSEADRAQKMDGESEEEQESVDTGEEEEGGDESDLSSESSIKKKFLKRKGKTDSPWIKPARKRRRRSRKKPSGALGSESYKSSAGSAEQTAPGDSTGYMEVSLDSLDLRVKGILSSQAEGLANGPDVLETDGLQEVPLCSCRMETPKSREITTLANNQCMATESVDHELGRCTNSVVKYELMRPSNKAPLLVLCEDHRGRMVKHQCCPGCGYFCTAGNFMECQPESSISHRFHKDCASRVNNASYCPHCGEESSKAKEVTIAKADTTSTVTPVPGQEKGSALEGRADTTTGSAAGPPLSEDDKLQGAASHVPEGFDPTGPAGLGRPTPGLSQGPGKETLESALIALDSEKPKKLRFHPKQLYFSARQGELQKVLLMLVDGIDPNFKMEHQNKRSPLHAAAEAGHVDICHMLVQAGANIDTCSEDQRTPLMEAAENNHLEAVKYLIKAGALVDPKIQKTSKVYTESQETQRSQTIL

SEQ ID NO: 281 - protein, 852 aa, Homo sapiens
MENRYQDLEKNFTTKQQLCLNAIRVFTSMAATQLSVTVTVLGIPQFQSVLKAVPARGEPQQDCCVKTELLGEETPMAADEGSAEKQAGEAHMAADGETNGSCENSDASSHANAAKHTQDSARVNPQDGTNTLTRIAENGVSERDSEAAKQNHVTADDFVQTSVIGSNGYILNKPALQAQPLRTTSTLASSLPGHAAKTLPGGAGKGRTPSAFPQTPAAPPATLGEGSADTEDRKLPAPGADVKVHRARKTMPKSVVGLHAASKDPREVREARDHKEPKEEINKNISDFGRQQLLPPFPSLHQSLPQNQCYMATTKSQTACLPFVLAAAVSRKKKRRMGTYSLVPKKKTKVLKQRTVIEMFKSITHSTVGSKGEKDLGASSLHVNGESLEMDSDEDDSEELEEDDGHGAEQAAAFPTEDSRTSKESMSEADRAQKMDGESEEEQESVDTGEEEEGGDESDLSSESSIKKKFLKRKGKTDSPWIKPARKRRRRSRKKPSGALGSESYKSSAGSAEQTAPGDSTGYMEVSLDSLDLRVKGILSSQAEGLANGPDVLETDGLQEVPLCSCRMETPKSREITTLANNQCMATESVDHEGNFMECQPESSISHRFHKDCASRVNNASYCPHCGEESSKAKEVTIAKADTTSTVTPVPGQEKGSALEGRADTTTGSAAGPPLSEDDKLQGAASHVPEGFDPTGPAGLGRPTPGLSQGPGKETLESALIALDSEKPKKLRFHPKQLYFSARQGELQKVLLMLVDGIDPNFKMEHQNKRSPLHAAAEAGHVDICHMLVQAGANIDTCSEDQRTPLMEAAENNHLEAVKYLIKAGALVDPKIQKTSKVYTESQETQRSQTIL

SEQ ID NO: 282 - protein, 875 aa, Homo sapiens
MENRYQDLEKNFTTKQQLCLNAIRVFTSMAATQLSVTVTVLGIPQFQSVLKAVPARGEPQQDCCVKTELLGEETPMAADEGSAEKQAGEAHMAADGETNGSCENSDASSHANAAKHTQDSARVNPQDGTNTLTRIAENGVSERDSEAAKQNHVTADDFVQTSVIGSNGYILNKPALQAQPLRTTSTLASSLPGHAAKTLPGGAGKGRTPSAFPQTPAAPPATLGEGSADTEDRKLPAPGADVKVHRARKTMPKSVVGLHAASKDPREVREARDHKEPKEEINKNISDFGRQQLLPPFPSLHQSLPQNQCYMATTKSQTACLPFVLAAAVSRKKKRRMGTYSLVPKKKTKVLKQRTVIEMFKSITHSTVGSKGEKDLGASSLHVNGESLEMDSDEDDSEELEEDDGHGAEQAAAFPTEDSRTSKESMSEADRAQKMDGESEEEQESVDTGEEEEGGDESDLSSESSIKKKFLKRKGKTDSPWIKPARKRRRRSRKKPSGALGSESYKSSAGSAEQTAPGDSTGYMEVSLDSLDLQEVPLCSCRMETPKSREITTLANNQCMATESVDHELGRCTNSVVKYELMRPSNKAPLLVLCEDHRGRMVKHQCCPGCGYFCTAGNFMECQPESSISHRFHKDCASRVNNASYCPHCGEESSKAKEVTIAKADTTSTVTPVPGQEKGSALEGRADTTTGSAAGPPLSEDDKLQGAASHVPEGFDPTGPAGLGRPTPGLSQGPGKETLESALIALDSEKPKKLRFHPKQLYFSARQGELQKVLLMLVDGIDPNFKMEHQNKRSPLHAAAEAGHVDICHMLVQAGANIDTCSEDQRTPLMEAAENNHLEAVKYLIKAGALVDPKIQKTSKVYTESQETQRSQTIL

SEQ ID NO: 283 - protein, 397 aa, Homo sapiens
MNATLKRYQTEHKNKLESLEKSQAELKKIRRKSQGSRNALKYEHKEIEYVETVTSRQSEIQKFIADGCKEALLEEKRRFCFLVDKHCGFANHIHYYHLQSAELLNSKLPRWQETCVDAIKVPEKIMNMIEEIKTPASTPVSGTPQASPMIERSNVVRKDYDTLSKCSPKMPPAPSGRAYTSPLIDMFNNPATAAPNSQRVNNSTGTSEDPSLQRSVSVATGLNMMKKQKVKTIFPHTAGSNKTLLSFAQGDVITLLIPEEKDGWLYGEHDVSKARGWFPSSYTKLLEENETEAVTVPTPSPTPVRSISTVNLSENSSVVIPPPDYLECLSMGAAADRRADSVRTTSTFKAPVFKPETAAPNDANGTAKPPFLSGENPFATVKLRPTVTNDRSAPIIR

SEQ ID NO: 284 - protein, 530 aa, Homo sapiens
MSDPEGETLRSTFPSYMAEGERLYLCGEFSKAAQSFSNALYLQDGDKNCLVARSKCFLKMGDLERSLKDAEASLQSDPAFCKGILQKAETLYTMGDFEFALVFYHRGYKLRPDREFRVGIQKAQEAINNSVGSPSSIKLENKGDLSFLSKQAENIKAQQKPQPMKHLLHPTKGEPKWKASLKSEKTVRQLLGELYVDKEYLEKLLLDEDLIKGTMKGGLTVEDLIMTGINYLDTHSNFWRQQKPIYARERDRKLMQEKWLRDHKRRPSQTAHYILKSLEDIDMLLTSGSAEGSLQKAEKVLKKVLEWNKEEVPNKDELVGNLYSCIGNAQIELGQMEAALQSHRKDLEIAKEYDLPDAKSRALDNIGRVFARVGKFQQAIDTWEEKIPLAKTTLEKTWLFHEIGRCYLELDQAWQAQNYGEKSQQCAEEEGDIEWQLNASVLVAQAQVKLRDFESAVNNFEKALERAKLVHNNEAQQAIISALDDANKGIIRELRKTNYVENLKEKSEGVRDTCDSSSPIWGLGTAHRAF

SEQ ID NO: 285 - protein, 440 aa, Homo sapiens
MDPLETPIKDGILYQQHVKFGKKCWRKVWALLYAGGPSGVARLESWEVRDGGLGAAGDRSAGPGRRGERRVIRLADCVSVLPADGESCPRDTGAFLLTTTERSHLLAAQHRQAWMGPICQLAFPGTGEASSGSTDAQSPKRGLVPMEENSIYSSWQEVGEFPVVVQRTEAATRCQLKGPALLVLGPDAIQLREAKGTQALYSWPYHFLRKLGSDKGVFSFEAGRRCHSGEGLFAFSTPCAPDLCRAVAGAIARQRERLPELTRPQPCPLPRATSLPSLDTPGELREMPPGPEPPTSRKMHLAEPGPQSLPLLLGPEPNDLASGLYASVCKRASGPPGNEHLYENLCVLEASPTLHGGEPEPHEGPGSRSPTTSPIYHNGQDLSWPGPANDSTLEAQYRRLLELDQVEGTGRPDPQAGFKAKLVTLLSRERRKGPAPCDRP

SEQ ID NO: 286 - protein, 482 aa, Homo sapiens
MDRMKKIKRQLSMTLRGGRGIDKTNGAPEQIGLDESGGGGGSDPGEAPTRAAPGELRSARGPLSSAPEIVHEDLKMGSDGESDQASATSSDEVQSPVRDINKRLSLPADIRLPEGYLEKLTLNSPIFDKPLSRRLRRVSLSEIGFGKLETYIKLDKLGEGTYATVYKGKSKLTDNLVALKEIRLEHEEGAPCTAIREVSLLKDLKHANIVTLHDIIHTEKSLTLVFEYLDKDLKQYLDDCGNIINMHNVKLFLFQLLRGLAYCHRQKVLHRDLKPQNLLINERGELKLADFGLARAKSIPTKTYSNEVVTLWYRPPDILLGSTDYSTQIDMWGVGCIFYEMATGRPLFPGSTVEEQLHFIFRILGTPTEETWPGILSNEEFKTYNYPKYRAEALLSHAPRLDSDGADLLTKLLQFEGRNRISAEDAMKHPFFLSLGERIHKLPDTTSIFALKEIQLQKEASLRSSSMPDSGRPAFRVVDTEF

SEQ ID NO: 287 - protein, 434 aa, Homo sapiens
MAAAAGSCARVAAWGGKLRRGLAVSRQAVRSPGPLAAAVAGAALAGAGAAWHHSRVSVAARDGSFTVSAQKNVEHGIIYIGKPSLRKQRFMQFSSLEHEGEYYMTPRDFLFSVMFEQMERKTSVKKLTKKDIEDTLSGIQTAGCGSTFFRDLGDKGLISYTEYLFLLTILTKPHSGFHVAFKMLDTDGNEMIEKREFFKLQKIISKQDDLMTVKTNETGYQEAIVKEPEINTTLQMRFFGKRGQRKLHYKEFRRFMENLQTEIQEMEFLQFSKGLSFMRKEDFAEWLLFFTNTENKDIYWKNVREKLSAGESISLDEFKSFCHFTTHLEDFAIAMQMFSLAHRPVRLAEFKRAVKVATGQELSNNILDTVFKIFDLDGDECLSHEEFLGVLKNRMHRGLWVPQHQSIQEYWKCVKKESIKGVKEVWKQAGKGLF

SEQ ID NO: 288 - protein, 320 aa, Homo sapiens
MPQTLSASDMVTPGSLSPPPTEPTDGEQAGQPLLDGAPSSASLETLIQHLVPTADYYPEKAYIFTFLLSSRLFIEPRELLARVCHLCIEQQQLDKPVLDKARVRKFGPKLLQLLAEWTETFPRDFQEESTIGHLKDVVGRIAPCDEAYRKRMHQLLQALHQKLAALRQGPEGLVGADKPISYRTKPPASIHRELLGVCSDPYTLAQQLTHVELDAAADIGPEEFVQAFVNKDPLASTKPCFSDKTSNLEAYVKWFNRLCYLVATEICMPAKKKQRAQVIEFFIDVARECFNIGNFNSLMAIISGMNMSPVSQAEEDLGPK

SEQ ID NO: 289 - protein, 370 aa, Homo sapiens
MWRKGKPYVLFVGRSLHGISDASSPHFRGRVRSRQPQSSGISLSLRPPPPVWVPMAGTAAAGGQPPRVSMQEHMAIDVSPGPIRPIRLISHYFPHFYPFAEPALHPPNLRPAAASAVRSAPQLQPDPEPEGDSDDSTALGTLEFTLLFEADNSALHCTAHRAKGLKPLASGSADAYVKANLLPGASKASQLRTHTVRGTRVPVWEETLTYHGFTRQDAECKTLRSDLGGHQAVCVRGPMVQRQWQAPSLGELRVPLRKLVPNRARSFDICLEKRRLAKRPKSLDTACGMSLYEEEVETEVAWEECGHVLLSLCYSSQQGGLLVGVLRCAHLAPMDANGYSDPFVRLNSFTQAHGRSWPRRRCWCLCGTMT

SEQ ID NO: 290 - protein, 328 aa, Homo sapiens
MQTYRKNVQQMMQCLIRKLAALSQYEEVLAKISSTSTDRLTVLKTKPQSIQRDIITVCNDPYTLAQQLTHIELERLNYIGPEEFVQAFVQKDPLDNDKSCYSERKKTRNLEAYVEWFNRLSYLVATEICMPVKKKHRARMIEYFIDVARECFNIGNFNSLMAIISGMNMSPVSRLKKTWAKVKTAKFDILEHQMDPSSNFYNYRTALRGAAQRSLTAHSSREKIVIPFFSLLIKDIYFLNEGCANRLPNGHVNFEKFWELAKQVSEFMTWKQVECPFERDRKILQYLLTVPVFSEDALYLASYESEGPENHIEKDRWKSLRSSLLGRV

SEQ ID NO: 291 - protein, 775 aa, Homo sapiens
MVGPEDAGACSGRNPKLLPVPAPDPVGQDRKVIRATGGFGGGVGAVEPPEEADEEEEADEEEETPPRQLLQRYLAAAGEQLEPGLCYCPLPAGQAGAPPPSAAPRSDACLLGSGSKHRGAEVADGRAPRHEGMTNGDSGFLPGRDCRDLEEARGLARAGGRESRRRRPYGRLRLEGPGDEDADGAGSPSDWASPLEDPLRSCCLVAADAQEPEGAGSDSGDSPASSCSSSEDSEQRGVGAGGPEEGAPPATSAERTNGGAEPRLGFSDIHFNSRNTFQVSRGQSARDHLPPAGPPVPLPAAEQGPAGASARARRSGGFADFFTRNLFPKRTKELKSVVHSAPGWKLFGKVPPRENLQKTSKIIQQEYEARTGRTCKPPPQSSRRKNFEFEPLSTTALILEDRPSNLPAKSVEEALRHRQEYDEMVAEAKKREIKEAHKRKRIMKERFKQEENIASAMVIWINEILPNWEVMRSTRRVRELWWQGLPPSVRGKVWSLAVGNELNITPELYEIFLSRAKERWKSFSETSSENDTEGVSVADREASLELIKLDISRTFPSLYIFQKGGPYHDVLHSILGAYTCYRPDVGYVQGMSFIAAVLILNLEEADAFIAFANLLNKPCQLAFFRVDHSMMLKYFATFEVFFEENLSKLFLHFKSYSLTPDIYLIDWIFTLYSKSLPLDLACRVWDVFCRDGEEFLFRTGLGILRLYEDILLQMDFIHIAQFLTKLPEDITSEKLFSCIAAIQMQNSTKKWTQVFASVMKDIKEGDKNSSPALKS

SEQ ID NO: 292 - protein, 173 aa, Homo sapiens
MSSMNPEYDYLFKLLLIGDSGVGKSCLLLRFADDTYTESYISTIGVDFKIRTIELDGKTIKLQIESFNNVKQWLQEIDRYASENVNKLLVGNKCDLTTKKVVDYTTAKEFADSLGIPFLETSAKNATNVEQSFMTMAAEIKKRMGPGATAGGAEKSNVKIQSTPVKQSGGGCC

SEQ ID NO: 293 - protein, 596 aa, Homo sapiens
MATENGAVELGIQNPSTDKAPKGPTGERPLAAGKDPGPPDPKKAPDPPTLKKDAKAPASEKGDGTLAQPSTSSQGPKGEGDRGGGPAEGSAGPPAALPQQTATPETSVKKPKAEQGASGSQDPGKPRVGKKAAEGQAAARRGSPAFLHSPSCPAIISSSEKLLAKKPPSEASELTFEGVPMTHSPTDPRPAKAEEGKNILAESQKEVGEKTPGQAGQAKMQGDTSRGIEFQAVPSEKSEVGQALCLTAREEDCFQILDDCPPPPAPFPHRMVELRTGNVSSEFSMNSKEALGGGKFGAVCTCMEKATGLKLAAKVIKKQTPKDKEMVLLEIEVMNQLNHRNLIQLYAAIETPHEIVLFMEYIEGGELFERIVDEDYHLTEVDTMVFVRQICDGILFMHKMRVLHLDLKPENILCVNTTGHLVKIIDFGLARRYNPNEKLKVNFGTPEFLSPEVVNYDQISDKTDMWSMGVITYMLLSGLSPFLGDDDTETLNNVLSGNWYFDEETFEAVSDEAKDFVSNLIVKDQRARMNAAQCLAHPWLNNLAEKAKRCNRRLKSQILLKKYLMKRRWKKNFIAVSAANRFKKISSSGALMALGV

SEQ ID NO: 294 - protein, 655 aa, Homo sapiens
MKGASEEKLASVSNLVTVFENSRTPEAAPRGQRLEDVHHRPECRPPESPGPREKTNVGEAVGSEPRTVSRRYLNSLKNKLSSEAWRKSCQPVTLSGSGTQEPEKKIVQELLETEQAYVARLHLLDQVFFQELLKTARSSKAFPEDVVRVIFSNISSIYQFHSQFFLPELQRRLDDWTANPRIGDVIQKLAPFLKMYSEYVKNFERAAELLATWTDKSPLFQEVLTRIQSSEASGSLTLQHHMLEPVQRIPRYELLLKEYIQKLPAQAPDQADAQKALDMIFSAAQHSNAAITEMERLQDLWEVYQRLGLEDDIVDPSNTLLREGPVLKISFRRNDPMERYLFLFNNMLLYCVPRVIQVGAQFQVRTRIDVAGMKVRELMDAEFPHSFLVSGKQRTLELQARSQEEMISWMQAFQAAIDQIEKRNETFKAAAQGPEGDIQEQELQSEELGLRAPQWVRDKMVTMCMRCQEPFNALTRRRHHCRACGYVVCARCSDYRAELKYDDNRPNRVCLHCYAFLTGNVLPEAKEDKRRGILEKGSSATPDQSLMCSFLQLIGDKWGKSGPRGWCVIPRDDPLVLYVYAAPQDMRAHTSIPLLGYQVTVGPQGDPRVFQLQQSGQLYTFKAETEELKGRWVKAMERAASGWSPSWPNDGDLSD

SEQ ID NO: 295 - protein, 938 aa, Homo sapiens
MNLCGLMPIFPAPLDQVADMEELTIWEQHTATLSKDPRRGFGIAISGGRDRPGGSMVVSDVVPGGPAEGRLQTGDHIVMVNGVSMENATSAFAIQILKTCTKMANITVKRPRRIHLPATKASPSSPGRQDSDEDDGPQRVEEVDQGRGYDGDSSSGSGRSWDERSRRPRPGRRGRAGSHGRRSPGGGSEANGLALVSGFKRLPRQDVQMKPVKSVLVKRRDSEEFGVKLGSQIFIKHITDSGLAARHRGLQEGDLILQINGVSSQNLSLNDTRRLIEKSEGKLSLLVLRDRGQFLVNIPPAVSDSDSSPLEDISDLASELSQAPPSHIPPPPRHAQRSPEASQTDSPVESPRLRRESSVDSRTISEPDEQRSELPRESSYDIYRVPSSQSMEDRGYSPDTRVVRFLKGKSIGLRLAGGNDVGIFVSGVQAGSPADGQGIQEGDQILQVNDVPFQNLTREEAVQFLLGLPPGEEMELVTQRKQDIFWKMVQSRVGDSFYIRTHFELEPSPPSGLGFTRGDVFHVLDTLHPGPGQSHARGGHWLAVRMGRDLREQERGIIPNQSRAEQLASLEAAQRAVGVGPGSSAGSNARAEFWRLRGLRRGAKKTTQRSREDLSALTRQGRYPPYERVVLREASFKRPVVILGPVADIAMQKLTAEMPDQFEIAETVSRTDSPSKIIKLDTVRVIAEKDKHALLDVTPSAIERLNYVQYYPIVVFFIPESRPALKALRQWLAPASRRSTRRLYAQAQKLRKHSSHLFTATIPLNGTSDTWYQELKAIIREQQTRPIWTAEDQLDGSLEDNLDLPHHGLADSSADLSCDSRVNSDYETDGEGGAYTDGEGYTDGEGGPYTDVDDEPPAPALARSSEPVQADESQSPRDRGRISAHQGAQVDSRHPQGQWRQDSMRTYEREALKKKFMRVHDAESSDEDGYDWGPATDL

SEQ ID NO: 296 - protein, 556 aa, Homo sapiens
MHGSLEALLFLPQVTLSLAHAHLICSNAQLEMCVFPHRFLGDLTTEGINKPGFYKGPAGSQVTLSSLGNQTRVLLEEQARHLLNEQEHTTMAYYLDEYRGGSVSVEALVMALFKLLNTHAKFSLLSEVRGTISPQDLERFDHLVLRREIESMKARQPPGPGAGDTYSMVSYSDTGSSTGSHGTSTTVSSARNTLDLEETGEAVQGNINALPDVSVDDVRSTSQGLSSFKPLPRPPPLAQGNDLPLGQPRKLGREDLQPPSSTPSCSGTVFSAPQNRSPPAGTAPTPGTSSAQDLPSSPIYASVSPANPSSKRPLDAHLALVNQHPIGPFPRVQSPPHLKSPSAEATVAGGCLLPPSPSGHPDQTVTNQHFVMVEVHRPDSEPDVNEVRALPQTRTASTLSQLSDSGQTLSEDSGVDAGEAEASAPGRGRQSASTKSRSSKELPRNERPTDGANKPPGLLEPTSTLVRVKKSAATLGIAIEGGANTRQPLPRIVTIQRGGSAHNCGQLKVGHVILEVNGLTLRGKEHREAARIIAEAFKTKDRDYIDFLVTEFNVML

SEQ ID NO: 297 - protein, 593 aa, Homo sapiens
MVSPPPGAAAVAARAGLRVGPAPRPLMGSQGRSGPPGNGGPGEGEGGEARKLQEGRVARGKRRKGKGKGKARAGQGGRGSGAEGKPGPQTAKEAAGPGADAGARACPREEAEGGRSVEEGARGIVKGVEGSAGAGKEAQGREYGKKEEWRVRARRREGARPGRAQGRGGQAWADIAGTGEAMAAAAGEEEEEEEAARESAARPAAGPALWRLPEELLLLICSYLDMRALGRLAQVCRWLRRFTSCDLLWRRIARASLNSGFTRLGTDLMTSVPVKERVKVSQNWRLGRCREGILLKWRCSQMPWMQLEDDSLYISQANFILAYQFRPDGASLNRRPLGVFAGHDEDVCHFVLANSHIVSAGGDGKIGIHKIHSTFTVKYSAHEQEVNCVDCKGGIIVSGSRDRTAKVWPLASGRLGQCLHTIQTEDRVWSIAISPLLSSFVTGTACCGHFSPLRIWDLNSGQLMTHLGSDFPPGAGVLDVMYESPFTLLSCGYDTYVRYWDLRTSVRKCVMEWEEPHDSTLYCLQTDGNHLLATGSSYYGVVRLWDRRQRACLHAFPLTSTPLSSPVYCLRLTTKHLYAALSYNLHVLDFQNP

SEQ ID NO: 298 - protein, 561 aa, Homo sapiens
MVSPPPGAAAVAARAGLRVGPAPRPLMGSQGRSGPPGNGGPGEGEGGEARKLQEGRVARGKRRKGKGKGKARAGQGGRGSGAEGKPGPQTAKEAAGPGADAGARACPREEAEGGRSVEEGARGIVKGVEGSAGAGKEAQGREYGKKEEWRVRARRREGARPGRAQGRGGQAWADIAGTGEAMAAAAGEEEEEEEAARESAARPAAGPALWRLPEELLLLICSYLDMRALGRLAQVCRWLRRFTSCDLLWRRIARASLNSGFTRLGTDLQMPWMQLEDDSLYISQANFILAYQFRPDGASLNRRPLGVFAGHDEDVCHFVLANSHIVSAGGDGKIGIHKIHSTFTVKYSAHEQEVNCVDCKGGIIVSGSRDRTAKVWPLASGRLGQCLHTIQTEDRVWSIAISPLLSSFVTGTACCGHFSPLRIWDLNSGQLMTHLGSDFPPGAGVLDVMYESPFTLLSCGYDTYVRYWDLRTSVRKCVMEWEEPHDSTLYCLQTDGNHLLATGSSYYGVVRLWDRRQRACLHAFPLTSTPLSSPVYCLRLTTKHLYAALSYNLHVLDFQNP

SEQ ID NO: 299 - protein, 631 aa, Homo sapiens
MGRGPPAGPGGAVLPSGAAAAGGHCQGASGWSARRAGASAAAAAADTAAHGPAPPLPSPLAPAALVSQPPAALVARPAMSLGGASERSVPATKIEITVSCRNLLDLDTFSKSDPMVVLYTQSRASQEWREFGRTEVIDNTLNPDFVRKFVLDYFFEEKQNLRFDVYNVDSKTNISKPKDFLGQAFLALGEVIGGQGSRVERTLTGVPGKKCGTILLTAEELSNCRDIATMQLCANKLDKKDFFGKSDPFLVFYRSNEDGTFTICHKTEVVKNTLNPVWQPFSIPVRALCNGDYDRTVKIDVYDWDRDGSHDFIGEFTTSYRELSKAQNQFTVYEVLNPRKKCKKKKYVNSGTVTLLSFSVDSEFTFVDYIKGGTQLNFTVAIDFTASNGNPLQPTSLHYMSPYQLSAYAMALKAVGEIIQDYDSDKLFPAYGFGAKLPPEGRISHQFPLNNNDEDPNCAGIEGVLESYFQSLRTVQLYGPTYFAPVINQVARAAAKISDGSQYYVLLIITDGVISDMTQTKEAIVSASSLPMSIIIVGVGPAMFEAMEELDGDDVRVSSRGRYAERDIVQFVPFRDYVDRSGNQVLSMARLAKDVLAEIPEQLLSYMRTRDIQPRPPPPANPSPIPAPEQP

SEQ ID NO: 300 - protein, 472 aa, Homo sapiens
MGGTQVKCLTSPSPIHSAKSESIITQSEEKADFVIIPAEGIENRTEGTDSPLSRDWRPGSPGTYLETSWEEQLLEQQEYLEKEMEEAKKMISGLQALLLNGSLPEDEQERPLALCEPGVNPEEQLIIIQSRLDQSMEENQDLKKELLKCKQEARNLQGIKDALQQRLTQQDTSVLQLKQELLRANMDKDELHNQNVDLQRKLDERNRLLGEYKKELGQKDRLLQQHQAKLEEALRKLSDVSYHQVDLERELEHKDVLLAHCMKREADEATNYNSHNSQSNGFLLPTAGKGATSVSNRGTSDLQLVRDALRSLRNSFSGHDPQHHTIDSLEQGISSLMERLHVMETQKKQERKVRVKSPRTQVGSEYRESWPPNSKLPHSQSSPTVSSTCTKVLYFTDRSLTPFMVNIPKRLEEVTLKDFKAAIDREGNHRYHFKALDPEFGTVKEEIFHDDDAIPGWEGKIVAWVEEDHGEN

SEQ ID NO: 301 - protein, 1165 aa, Homo sapiens
MPNSVLWAVDLFGRVYTLSTAGQYWEMCKDSQLEFKRVSATTQCCWGIACDNQVYVYVCASDVPIRRREEAYENQRWNPMGGFCEKLLLSDRWGWSDVSGLQHRPLDRVALPSPHWEWESDWYVDENFGGEPTEKGGWTYAIDFPATYTKDKKWNSCVRRRKWIRYRRYKSRDIWAKIPSKDDPKELPDPFNDLSVGGWEITEEPVGRLSVWAVSLQGKVWYREDVSHSNPEGSSWSLLDTPGEVVQISCGPHDLLWATLWEGQALVREGINRSNPKGSSWSIVEPPGSENGVMHISVGVSVVWAVTKDWKVWFRRGVNSHNPCGTSWIEMVGEMTMVNVGMNDQVWGIGCEDRAVYFRQGVTPSELSGKTWKAIIAARECDRSHSGSSSSLLSAGCFFGDEVRGSGESAPSDTDASSEVERPGPGQILPAEPLDDSKNATGNSASGLGAGRTAEDTVEDACPAEGSREARPNTHPGPAPTPAELPWTNIDLKEAKKVPSHSAAGFPETTSLSSLGLLPLGLEEPYGVDDHPLWAWVSGGGCVVEACAMPRWFTVQAGLSSSVHMLSLSITPAQTAAWRKQIFQQLTERTKRELENFRHYEQAVEQSVWVKTGALQWWCDWKPHKWVDVRLALEQFTGHDGVRDSILFIYYVVHEEKKYIHIFLNEVVALVPVLNETKHSFALYTPERTRQRWPVRLAAATEQDMNDWLALLSLSCCESRKVQGRPSPQAIWSITCKGDIFVSEPSPDLEAHEHPLPCDQMFWRQMGGHLRMVEANSRGVVWGIGYDHTAWVYTGGYGGGCFQGLASSTSNIYTQSDVKCVHIYENQRWNPVTGYTSRGLPTDRYMWSDASGLQECTKAGTKPPSLQWAWVSDWFVDFSVPGGTDQEGWQYASDFPASYHGSKTMKDFVRRRCWARKCKLVTSGPWLEVPPIALRDVSIIPESPGAEGSGHSIALWAVSDKGDVLCRLGVSELNPAGSSWLHVGTDQPFASISIGACYQVWAVARDGSAFYRGSVYPSQPAGDCWYHIPSPPRQRLKQVSAGQTSVYALDENGNLWYRQGITPSYPQGSSWEHVSNNVCRVSVGPLDQVWVIANKVQGSHSLSRGTVCHRTGVQPHEPKGHGWDYGIGGGWDHISVRANATRAPRSSSQEQEPSAPPEAHGPVCC

SEQ ID NO: 302 - protein, 355 aa, Homo sapiens
MSSTQFNKGPSYGLWADVQNQLLSKYDSQKEAELRSWIKGLTGLFIRPDFQKGLKDGIILCTLVNKLQPGSVPKINGFRVELAPARKPLQHPQGNGQLRHDPVDLFEANDLFESGNNMQVRVSLLALAGKAKTKGLQSGVDIRDKYSEKQNFNDTTMKARLCVIRLQITNKCASQSGMTAYVTRRHLYDPKNRILPPMDNSTISLRMGTNKCASQVGMTAPGNQWHIYDTKLGIDKCENSSMSLKMGYTQVANHSRQVFGLGRQIYEPKYQPGVVLRERKAVHVPNEGKPLGISHFLCDIMKIHTGEKPYECNKSQKGFRSSLHLNKHLRKNTLEKPYGCKECGKAFSKPQNMHI

SEQ ID NO: 303 - protein, 304 aa, Homo sapiens
MSSIKHLVYAVIRFLREQSQMDTYTSDEQESLEVAIQCLETVFKISPEDTHLAVSQPLTEMFTSSFCKNDVLPLSNSVPEDVGKADQLKDEGNNHMKEENYAAAVDCYTQAIELDPNNAVYYCNRAAAQSKLGHYTDAIKDCEKAIAIDSKYSKAYGRMGLALTALNKFEEAVTSYQKALDLDPENDSYKSNLKIAEQKLREVSSPTGTGLSFDMASLINNPAFISMAASLMQNPQVQQLMSGMMTNAIGGPAAGVGGLTDLSSLIQAGQQFAQQIQQQNPELIEQLRNHIRSRSFSSSAEEHS

SEQ ID NO: 304 - protein, 426 aa, Homo sapiens
MANDSGGPGGPSPSERDRQYCELCGKMENLLRCSRCRSSFYCCKEHQRQDWKKHKLVCQGSEGALGHGVGPHQHSGPAPPAAVPPPRAGAREPRKAAARRDNASGDAAKGKVKAKPPADPAAAASPCRAAAGGQGSAVAAEAEPGKEEPPARSSLFQEKANLYPPSNTPGDALSPGGGLRPNGQTKPLPALKLALEYIVPCMNKHGICVVDDFLGKETGQQIGDEVRALHDTGKFTDGQLVSQKSDSSKDIRGDKITWIEGKEPGCETIGLLMSSMDDLIRHCNGKLGSYKINGRTKAMVACYPGNGTGYVRHVDNPNGDGRCVTCIYYLNKDWDAKVSGGILRIFPEGKAQFADIEPKFDRLLFFWSDRRNPHEVQPAYATRYAITVWYFDADERARAKVKYLTGEKGVRVELNKPSDSVGKDVF

SEQ ID NO: 305 - protein, 275 aa, Homo sapiens
MPALRPALLWALLALWLCCATPAHALQCRDGYEPCVNEGMCVTYHNGTGYCKCPEGFLGEYCQHRDPCEKNRCQNGGTCVAQAMLGKATCRCASGFTGEDCQYSTSHPCFVSRPCLNGGTCHMLSRDTYECTCQVGFTGKECQWTDACLSHPCANGSTCTTVANQFSCKCLTGFTGQKCETDVNECDIPGHCQHGGICLNLPGSYQCQCLQGFTGQYCDSLYVPCAPSPCVNGGTCRQTGDFTFECNCLPETVRRGTELWERDREVWNGKEHDEN

SEQ ID NO: 306 - protein, 164 aa, Homo sapiens
MLLLDCNPEVDGLKHLLETGASVNAPPDPCKQSPVHLAAGSGLACFLLWQLQTGADLNQQDVLGEAPLHKAAKVGSLECLSLLVASDAQIDLCNKNGQTAEDLAWSCGFPDCAKFLTTIKCMQTIKASEHPDRNDCVAVLRQKRSLRKCRKYQWEKEVLMSRGL

SEQ ID NO: 307 - protein, 1154 aa, Homo sapiens
MGLLLMILASAVLGSFLTLLAQFFLLYRRQPEPPADEAARAGEGFRYIKPVPGLLLREYLYGGGRDEEPSGAAPEGGATPTAAPETPAPPTRETCYFLNATILFLFRELRDTALTRRWVTKKIKVEFEELLQTKTAGRLLEGLSLRDVFLGETVPFIKTIRLVRPVVPSATGEPDGPEGEALPAACPEELAFEAEVEYNGGFHLAIDVDLVFGKSAYLFVKLSRVVGRLRLVFTRVPFTHWFFSFVEDPLIDFEVRSQFEGRPMPQLTSIIVNQLKKIIKRKHTLPNYKIRFKPFFPYQTLQGFEEDEEHIHIQQWALTEGRLKVTLLECSRLLIFGSYDREANVHCTLELSSSVWEEKQRSSIKTVELIKGNLQSVGLTLRLVQSTDGYAGHVIIETVAPNSPAAIADLQRGDRLIAIGGVKITSTLQVLKLIKQAGDRVLVYYERPVGQSNQGAVLQDNFGQLEENFLSSSCQSGYEEEAAGLTVDTESRELDSEFEDLASDVRAQNEFKDEAQSLSHSPKRVPTTLSIKPLGAISPVLNRKLAVGSHPLPPKIQSKDGNKPPPLKTSEITDPAQVSKPTQGSAFKPPVPPRPQAKVPLPSADAPNQAEPDVLVEKPEKVVPPPLVDKSAEKQAKNVDAIDDAAAPKQFLAKQEVAKDVTSETSCPTKDSSDDRQTWESSEILYRNKLGKWTRTRASCLFDIEACHRYLNIALWCRDPFKLGGLICLGHVSLKLEDVALGCLATSNTEYLSKLRLEAPSPKAIVTRTALRNLSMQKGFNDKFCYGDITIHFKYLKEGESDHHVVTNVEKEKEPHLVEEVSVLPKEEQFVGQMGLTENKHSFQDTQFQNPTWCDYCKKKVWTKAASQCMFCAYVCHKKCQEKCLAETSVCGATDRRIDRTLKNLRLEGQETLLGLPPRVDAEASKSVNKTTGLTRHIINTSSRLLNLRQVSKTRLSEPGTDLVEPSPKHTPNTSDNEGSDTEVCGPNSPSKRGNSTGIKLVRKEGGLDDSVFIAVKEIGRDLYRGLPTEERIQKLEFMLDKLQNEIDQELEHNNSLVREEKETTDTRKKSLLSAALAKSGERLQALTLLMIHYRAGIEDIETLESLSLDQHSKKISKYTDDTEEDLDNEISQLIDSQPFSSISDDLFGPSESV

SEQ ID NO: 308 - protein, 392 aa, Homo sapiens [sequence omitted]

SEQ ID NO: 309 - protein, 823 aa, Homo sapiens
MPGVARLPLLLGLLLLPRPGRPLDLADYTYDLAEEDDSEPLNYKDPCKAAAFLGDIALDEEDLRAFQVQQAVDLRRHTARKSSIKAAVPGNTSTPSCQSTNGQPQRGACGRWRGRSRSRRAATSRPERVWPDGVIPFVIGGNFTGSQRAVFRQAMRHWEKHTCVTFLERTDEDSYIVFTYRPCGCCSYVGRRGGGPQAISIGKNCDKFGIVVHELGHVVGFWHEHTRPDRDRHVSIVRENIQPGQEYNFLKMEPQEVESLGETYDFDSIMHYARNTFSRGIFLDTIVPKYEVNGVKPPIGQRTRLSKGDIAQARKLYKCPACGETLQDSTGNFSSPEYPNGYSAHMHCVWRISVTPGEKIILNFTSLDLYRSRLCWYDYVEVRDGFWRKAPLRGRFCGSKLPEPIVSTDSRLWVEFRSSSNWVGKGFFAVYEAICGGDVKKDYGHIQSPNYPDDYRPSKVCIWRIQVSEGFHVGLTFQSLEIERHDSCAYDYLEVRDGHSESSTLIGRYCGYEKPDDIKSTSSRLWLKFVSDGSINKAGFAVNFFKEVDECSRPNRGGCEQRCLNTLGSYKCSCDPGYELAPDKRRCEAACGGFLTKLNGSITSPGWPKEYPPNKNCIWQLVAPTQYRISLQFDFFETEGNDVCKYDFVEVRSGLTADSKLHGKFCGSEKPEVITSQYNNMRVEFKSDNTVSKKGFKAHFFSVLEGAGDRHSHLSGLELLLCPHALVDTVPAPPSALHGDTHAHTHTHVHTHCPIAQETCRGPPLGASRLSPQGPGHLTLAPQEGSYLDFWDTHRGDPKPRRRRKSLKTFSLTPATFRGIWAL

SEQ ID NO: 310 - protein, 379 aa, Homo sapiens
MLTKGVGSDDGEDENRGDIPASISLSEIDPLGQGNDKLPFKTDTERSQLGESSVSYPNIIHIDSENLSETVKENSQEETPETTASPIEYQDKLYLHLKKNLSKVKAYAMEIGKKIPVPDQCTIEDTVRSCVAKLFFTCSLKGHYCLYSKSSFILISQEPQPWIQIMFLFQQSLFPEPLSIQSHSVQFLRALWEKTQAGGAHSFETAMMESTFPQQKDLDQVQLHLEEVRFFDVFGFSETAGAWQCFMCNNPEKATVVNQDGQPLIEGKLKEKQVRWKFIKRWKTRYFTLAGNQLLFQKGKSKDDPDDCPIELSKVQSVKAVAKKRRDRSLPRAFEIFTDNKTYVFKAKDEKNAEEWLQCINVAVAQAKERESREVTTYL

SEQ ID NO: 311 - protein, 389 aa, Homo sapiens
MKNYKAIGKIGEGTFSEVMKMQSLRDGNYYACKQMKQRFESDRKSGSLALICELMDMNIYELIRGRRYPLSEKKIMHYMYQLCKSLDHIHRNGIFHRDVKPENILIKQDVLKLGDFGSCRSVYSKQPYTEYISTRWYRAPECLLTDGFYTYKMDLWSAGCVFYEIASLQPLFPGVNELDQISKIHDVIGTPAQKILTKFKQSRAMNFDFPFKKGSGIPLLTTNLSPQCLSLLHAMVAYDPDERIAAHQALQHPYFQEQRKTEKRALGSHRKAGFPEHPVAPEPLSNSCQISKEGRKQKQSLKQEEDRPKRRGPAYVMELPKLKLSGVVRLSSYSSPTLQSVLGSGTNGRVPVLRPLKCIPASKKTDPQKDLKPAPQQCRLPTIVRKGGR

SEQ ID NO: 312 - protein, 891 aa, Homo sapiens
MDQPEAPCSSTGPRLAVARELLLAALEELSQEQLKRFRHKLRDVGPDGRSIPWGRLERADAVDLAEQLAQFYGPEPALEVARKTLKRADARDVAAQLQERRLQRLGLGSGTLLSVSEYKKKYREHVLQLHARVKERNARSVKITKRFTKLLIAPESAAPEEALGPAEEPEPGRARRSDTHTFNRLFRRDEEGRRPLTVVLQGPAGIGKTMAAKKILYDWAAGKLYQGQVDFAFFMPCGELLERPGTRSLADLILDQCPDRGAPVPQMLAQPQRLLFILDGADELPALGGPEAAPCTDPFEAASGARVLGGLLSKALLPTALLLVTTRAAAPGRLQGRLCSPQCAEVRGFSDKDKKKYFYKFFRDERRAERAYRFVKENETLFALCFVPFVCWIVCTVLRQQLELGRDLSRTSKTTTSVYLLFITSVLSSAPVADGPRLQGDLRNLCRLAREGVLGRRAQFAEKELEQLELRGSKVQTLFLSKKELPGVLETEVTYQFIDQSFQEFLAALSYLLEDGGVPRTAAGGVGTLLRGDAQPHSHLVLTTRFLFGLLSAERMRDIERHFGCMVSERVKQEALRWVQGQGQGCPGVAPEVTEGAKGLEDTEEPEEEEEGEEPNYPLELLYCLYETQEDAFVRQALCRFPELALQRVRFCRMDVAVLSYCVRCCPAGQALRLISCRLVAAQEKKKKSLGKRLQASLGGGSSQGTTKQLPASLLHPLFQAMTDPLCHLSSLTLSHCKLPDAVCRDLSEALRAAPALTELGLLHNRLSEAGLRMLSEGLAWPQCRVQTVRVQLPDPQRGLQYLVGMLRQSPALTTLDLSGCQLPAPMVTYLCAVLQHQGCGLQTLSLASVELSEQSLQELQAVKRAKPDLVIAHPALDGHPQPPKELISTF

SEQ ID NO: 313 - protein, 329 aa, Homo sapiens
MCCIYCGAACGGYFLISPKQHERWELGQRHLQLGAGKFEDREDHVPKLEQINSTRILSSQNFTLTKKELLSTELLLLEAFSWNLCLPTPAHFLDYYLLASVSQKDHHCHTWPTTCPRKTKECLKEYAHYFLEVTLQDHIFYKFQPSVVAAACVGASRICLQLSPYWTRDLQRISSYSLEHLSTCIEILLVVYDNVLKDAVAVKSQALAMVPGTPPTPTQVLFQPPAYPALGQPATTLAQFQTPVQDLCLAYRDSLQAHRSGSLLSGSTGSSLHTPYQPLQPLDMCPVPVPASLSMHMAIAAEPRHCLATTYGSSYFSGSHMFPTGCFDR

SEQ ID NO: 314 - protein, 681 aa, Homo sapiens [sequence omitted]

SEQ ID NO: 315 - protein, 1425 aa, Homo sapiens
MGRPAPAVPRPARPATPPAWTAALPAGRPRGDPGFRAFLCPLICHNGGVCVKPDRCLCPPDFAGKFCQLHSSGARPPAPAIPGLTRSVYTMPLANHRDDEHGVASMVSVHVEHPQEASVVVHQVERVSGPWEEADAEAVARAEAAARAEAAAPYTVLAQSAPREDGYSDASGFGYCFRELRGGECASPLPGLRTQEVCCRGAGLAWGVHDCQLCSERLGNSERVSAPDGPCPTGFERVNGSCEDVDECATGGRCQHGECANTRGGYTCVCPDGFLLDSSRSSCISQHVISEAKGPCFRVLRDGGCSLPILRNITKQICCCSRVGKAWGRGCQLCPPFGSEGFREICPAGPGYHYSASDLRYNTRPLGQEPPRVSLSQPRTLPATSRPSAGFLPTHRLEPRPEPRPDPRPGPEFPLPSIPAWTGPEIPESGPSSGMCQRNPQVCGPGRCISRPSGYTCACDSGFRLSPQGTRCIDVDECRRVPPPCAPGRCENSPGSFRCVCGPGFRAGPRAAECLDVDECHRVPPPCDLGRCENTPGSFLCVCPAGYQAAPHGASCQDVDECTQSPGLCGRGACKNLPGSFRCVCPAGFRGSACEEDVDECAQEPPPCGPGRCDNTAGSFHCACPAGFRSRGPGAPCQDVDECARSPPPCTYGRCENTEGSFQCVCPMGFQPNAAGSECEDVDECENHLACPGQECVNSPGSFQCRACPSGHHLHRGRCTDVDECSSGAPPCGPHGHCTNTEGSFRCSCAPGYRAPSGRPGPCADVNECLEGDFCFPHGECLNTDGSFACTCAPGYRPGPRGASCLDVDECSEEDLCQSGICTNTDGSFECICPPGHRAGPDLASCLDVDECRERGPALCGSQRCENSPGSYRCVRDCDPGYHAGPEGTCDDVNECETLQGVCGAALCENVEGSFLCVCPNSPEEFDPMTGRCVPPRTSAGMFPGSQPQAPASPVLPARPPPPPLPRRPSTPRQGPVGSGRRECYFDTAAPDACDNILARNVTWQECCCTVGEGWGSGCRIQQCPGTETAEYQSLCPHGRGYLAPSGDLSLRRDVDECQLFRDQVCKSGVCVNTAPGYSCYCSNGYYYHTQRLECIDNDECADEEPACEGGRCVNTVGSYHCTCEPPLVLDGSQRRCVSNESQSLDDNLGVCWQEVGADLVCSHPRLDRQATYTECCCLYGEAWGMDCALCPAQDSDDFEALCNVLRPPAYSPPRPGGFGLPYEYGPDLGPPYQGLPYGPELYPPPALPYDPYPPPPGPFARREAPYGAPRFDMPDFEDDGGPYGESEAPAPPGPGTRWPYRSRDTRRSFPEPEEPPEGGSYAGSLAEPYEELEAEECGILDGCTNGRCVRVPEGFTCRCFDGYRLDMTRMACVDINECDEAEAASPLCVNARCLNTDGSFRCICRPGFAPTHQPHHCAPARPRA

SEQ ID NO: 316 - protein, 314 aa, Homo sapiens
MQVCEPLGPDHNDLNSPNGRNCHNGRLREALPAFPLSSGTGEGCRPDARAEGQGGRLGVQETSWSEGKAAACTAMNKLFSFWKRKNETRSQGYNLREKDLKKLHRAASVGDLKKLKEYLQIKKYDVNMQDKKYRTPLHLACANGHTDVVLFLIEQQCKINVRDSENKSPLIKAVQCQNEDCATILLNFGADPDLRDIRYNTVLHYAVCGQSLSLVEKLLEYEADLEAKNKDGYTPLLVAVINNNPKMVKFLLEKGADVNASDNYQRTALILAVSGEPPCLRYKLLLQQGVELCYARYRGFTADGNMLHLHGFTA

SEQ ID NO: 317 - protein, 528 aa, Homo sapiens
MAEHLELLAEMPMVGRMSTQERLKHAQKRRAQQVKMWAQAEKEAQGKKGPGERPRKEAASQGLLKQVLFPPSVVLLEAAARNDLEEVRQFLGSGVSPDLANEDGLTALHQCCIDDFREMVQQLLEAGANINACDSECWTPLHAAATCGHLHLVELLIASGANLLAVNTDGNMPYDLCDDEQTLDCLETAMADRGITQDSIEAARAVPELRMLDDIRSRLQAGADLHAPLDHGATLLHVAAANGFSEAAALLLEHRASLSAKDQDGWEPLHAAAYWGQVPLVELLVAHGADLNAKSLMDETPLDVCGDEEVRAKLLELKHKHDALLRAQSRQRSLLRRRTSSAGSRGKVVRRVSLTQRTDLYRKQHAQEAIVWQQPPPTSPEPPEDNDDRQTGAELRPPPPEEDNPEVVRPHNGRVGGSPVRHLYSKRLDRSVSYQLSPLDSTTPHTLVHDKAHHTLADLKRQRAAAKLQRPPPEGPESPETAEPGLPGDTVTPQPDCGFRAGGDPPLLKLTAPAVEAPVERRPCCLLM

SEQ ID NO: 318 - protein, 669 aa, Homo sapiens
MILEERPDGAGAGEESPRLQGCDSLTQIQCGQLQSRRAQIHQQIDKELQMRTGAENLYRATSNNRVRETVALELSYVNSNLQLLKEELEELSGGVDPGRHGSEAVTVPMIPLGLKETKELDWSTPLKELISVHFGEDGASYEAEIRELEALRQAMRTPSRNESGLELLTAYYNQLCFLDARFLTPARSLGLFFHWYDSLTGVPAQQRALAFEKGSVLFNIGALHTQIGARQDRSCTEGARRAMEAFQRAAGAFSLLRENFSHAPSPDMSAASLCALEQLMMAQAQECVFEGLSPPASMAPQDCLAQLRLAQEAAQVAAEYRLVHRTMAQPPVHDYVPVSWTALVHVKAEYFRSLAHYHVAMALCDGSPTEGELPTHEQVFLQPPTSSKPRGPVLPQELEERRQLGKAHLKRAILGQEEALRLHALCRVLREVDLLRAVISQTLQRSLAKYAELDREDDFCEAAEAPDIQPKTHQKPEARMPRLSQGKGPDIFHRLGPLSVFSAKNRWRLVGPVHLTRGEGGFGLTLRGDSPVLIAAVIPGSQAAAAGLKEGDYIVSVNGQPCRWWRHAEVVTELKAAGEAGASLQVVSLLPSSRLPSLGDRRPVLLGPRGLLRSQREHGCKTPASTWASPRPLLNWSRKAQQGKTGGCPQPCAPVKPAPPSSLKHPGWP

SEQ ID NO: 319 - protein, 746 aa, Homo sapiens
MAGSRGAGRTAAPSVRPEKRRSEPELEPEPEPEPPLLCTSPLSHSTGSDSGVSDSEESVFSGLEDSGSDSSEDDDEGDEEGEDGALDDEGHSGIKKTTEEQVQASTPCPRTEMASARIGDEYAEDSSDEEDIRNTVGNVPLEWYDDFPHVGYDLDGRRIYKPLRTRDELDQFLDKMDDPDYWRTVQDPMTGRDLRLTDEQVALVRRLQSGQFGDVGFNPYEPAVDFFSGDVMIHPVTNRPADKRSFIPSLVEKEKVSRMVHAIKMGWIQPRRPRDPTPSFYDLWAQEDPNAVLGRHKMHVPAPKLALPGHAESYNPPPEYLLSEEERLAWEQQEPGERKLSFLPRKFPSLRAVPAYGRFIQERFERCLDLYLCPRQRKMRVNVDPEDLIPKLPRPRDLQPFPTCQALVYRGHSDLVRCLSVSPGGQWLVSGSDDGSLRLWEVATARCVRTVPVGGVVKSVAWNPSPAVCLVAAAVEDSVLLLNPALGDRLVAGSTDQLLSAFVPPEEPPLQPARWLEASEEERQVGLRLRICHGKPVTQVTWHGRGDYLAVVLATQGHTQVLIHQLSRRRSQSPFRRSHGQVQRVAFHPARPFLLVASQRSVRLYHLLRQELTKKLMPNCKWVSSLAVHPAGDNVICGSYDSKLVWFDLDLSTKPYRMLRHHKKALRAVAFHPRYPLFASGSDDGSVIVCHGMVYNDLLQNPLLVPVKVLKGHVLTRDLGVLDVIFHPTQPWVFSSGADGTVRLFT

SEQ ID NO: 320 - protein, 402 aa, Homo sapiens
MSNSRPRSRRDAGGGAGAAGRDELVSRSLQSAEHCLGVQDFGTAYAHYLLVLSLAPELKHDVKETFQYTLFRWAEELDALSRIQDLLGCYEQALELFPDDEVICNSMGEHLFRMGFRDEAAGYFHKAVKLNPDFSDAKENFYRVANWLVERWHFIMLNDTKRNTIYNAAIQKAVCLGSKSVLDIGAGTGILSMFAKKAGAHSVYACELSKTMYELACDVVAANKMEAGIKLLHTKSLDIEIPKHIPERVSLVVTETVDAGLFGEGIVESLIHAWEHLLLQPKTKGESANCEKYGKVIPASAVIFGMAVECAEIRRHHRVGIKDIAGIHLPTNVKFQSPAYSSVDTEETIEPYTTEKMSRVPGGYLALTECFEIMTVDFNNLQELKSLATKKPDKIGIPCLIF

SEQ ID NO: 321 - protein, 390 aa, Homo sapiens
MASPAIGQRPYPLLLDPEPPRYLQSLSGPELPPPPPDRSSRLCVPAPLSTAPGAREGRSARRAARGNLEPPPRASRPARPLRPGLQQRLRRRPGAPRPRDVRSIFEQPQDPRVPAERGEGHCFAELVLPGGPGWCDLCGREVLRQALRCTNCKFTCHPECRSLIQLDCSQQEGLSRDRPSPESTLTVTFSQNVCKPVEETQRPPTLQEIKQKIDSYNTREKNCLGMKLSEDGTYTGFIKVHLKLRRPVTVPAGIRPQSIYDAIKEVNLAATTDKRTSFYLPLDAIKQLHISSTTTVSEVIQGLLKKFMVVDNPQKFALFKRIHKDGQVLFQKLSIADRPLYLRLLAGPDTEVLSFVLKENETGEVEWDAFSIPELQNFLSSWCIQIYLYY

SEQ ID NO: 322 - protein, 344 aa, Homo sapiens
MADEDGEGIHPSAPHRNGGGGGGGGSGLHCAGNGGGGGGGRGSCASSSPSPATASTCGAKNHVNVEGATHKQVVDLIRAGEKELILTVLSVPPHEADNLDPSDDSLGQSFYDYTEKQAVPISVPRYKHVEQNGEKFVVYNVYMAGRQLCSKRYREFAILHQNLKREFANFTFPRLPGKWPFSLSEQQLDARRRGLEEYLEKVCSIRVIGESDIMQEFLSESDENYNGVSDVELRVALPDGTTVTVRVKKNSTTDQVYQAIAAKVGMDSTTVNYFALFEVISHSFVRKLAPNEFPHKLYIQNYTSAVPGTWLDHSKVAFYNRRRQSSLMTMTLLLPTSFIRQRMM

SEQ ID NO: 323 - protein, 1116 aa, Homo sapiens
MAADLNLEWISLPRSWTYGITRGGRVFFINEEAKSTTWLHPVTGEAVVTGHRRQSTDLPTGWEEAYTFEGARYYINHNERKVTCKHPVTGQPSQDNCIFVVNEQTVATMTSEEKKERPISMINEASNYNVTSDYAVHPMSPVGRTSRASKKVHNFGKRSNSIKRNPNAPVVRRGWLYKQDSTGMKLWKKRWFVLSDLCLFYYRDEKEEGILGSILLPSFQIALLTSEDHINRKYAFKAAHPNMRTYYFCTDTGKEMELWMKAMLDAALVQTEPVKRVDKITSENAPTKETNNIPNHRVLIKPEIQNNQKNKEMSKIEEKKALEAEKYGFQKDGQDRPLTKINSVKLNSLPSEYESGSACPAQTVHYRPINLSSSENKIVNVSLADLRGGNRPNTGPLYTEADRVIQRTNSMQQLEQWIKIQKGRGHEEETRGVISYQTLPRNMPSHRAQIMARYPEGYRTLPRNSKTRPESICSVTPSTHDKTLGPGAEEKRRSMRDDTMWQLYEWQQRQFYNKQSTLPRHSTLSSPKTMVNISDQTMHSIPTSPSHGSIAAYQGYSPQRTYRSEVSSPIQRGDVTIDRRHRAHHPKHVYVPDRRSVPAGLTLQSVSPQSLQGKTLSQDEGRGTLYKYRPEEVDIDAKLSRLCEQDKVVHALEEKLQQLHKEKYTLEQALLSASQEIEMHADNPAAIQTVVLQRDDLQNGLLSTCRELSRATAELERAWREYDKLEYDVTVTRNQMQEQLDHLGEVQTESAGIQRAQIQKELWRIQDVMEGLSKHKQQRGTTEIGMIGSKPFSTVKYKNEGPDYRLYKSEPELTTVAEVDESNGEEKSEPVSEIETSVVKGSHFPVGVVPPRAKSPTPESSTIASYVTLRKTKKMMDLRTERPRSAVEQLCLAESTRPRMTVEEQMERIRRHQQACLREKKKGLNVIGASDQSPLQSPSNLRDNPFRTTQTRRRDDKELDTAIRENDVKPDHETPATEIVQLKETEPQNVDFSKELKKTENISYEMLFEPEPNGVNSVEMMDKERNKDKMPEDVTFSPQDETQTANHKPEEHPEENTKNSVDEQEETVISYESTPEVSRGNQTMAVKSLSPSPESSASPVPSTQPQLTEGSHFMCV

SEQ ID NO: 324 - protein, 173 aa, Homo sapiens
MGSGFQELRICSEDQTPLIAGMCSLPMARYYIIKYADQKALYTRDGQLLVGDPVADNCCAEKICTLPNRGLDRTKVPIFLGIQGGSRCLACVETEEGPSLQLEDVNIEELYKGGEEATRFTFFQSSSGSAFRLEAAAWPGWFLCGPAEPQQPVQLTKESEPSARTKFYFEQSW

SEQ ID NO: 325 - protein, 198 aa, Homo sapiens
MPGVANSGPSTSSRETANPCSRKKVHFGSIHDAVRAGDVKQLSEIVVRGASINELDVLHKFTPLHWAAHSGSLECLHWLLWHGADITHVTTRGWTASHIAAIRGQDACVQALIMNGANLTAQDDRGCTPLHLAATHGHSFTLQIMLRSGVDPSVTDKREWRPVHYAAFHGRLGCLQLLVKWGCSIEDVDYNGNLPEPP

SEQ ID NO: 326 - protein, 303 aa, Homo sapiens
MGAVSCRQGQHTQQGEHTRVAVPHKQGGNIRGPWARGWKSLWTGLGTIRSDLEELWELRGHHYLHQESLKPAPVLVEKPLPEWPVPQFINLFLPEFPIRPIRGQQQLKILGLVAKGSFGTVLKVLDCTQKAVFAVKVVPKVKVLQRDTVRQCKEEVSIQRQINHPFVHSLGDSWQGKRHLFIMCSYCSTDLYSLWSAVGCFPEASIRLFAAELVLVLCYLHDLGIMHRDVKMENILLDERGHLKLTDFGLSRHVPQGAQAYTICGTLQYMAPEVLSGGPYNHAADWWSLGVLLFSLATGKVRE

SEQ ID NO: 327 - protein, 605 aa, Homo sapiens
MEIVYVYVKKRSEFGKQCNFSDRQAELNIDIMPNPELAEQFVERNPVDTGIQCSISMSEHEANSERFEMKTRGVNHVEGGWPKDVNPLELEQTIRFRKKVEKDENYVNAIMQLGSIMEHCIKQNNAIDIYEEYFNDEEAMEVMEEDPSAKTINVFRDPQEIKRAATHLSWHPDGNRKLAVAYSCLDFQRAPVGMSSDSYIWDLENPNKPELALKPSSPLVTLEFNPKDSHVLLGGCYNGQIACWDTRKGSLVAELSTIESSHRDPVYGTIWLQSKTGTECFSASTDGQVMWWDIRKMSEPTEVVILDITKKEQLENALGAISLEFESTLPTKFMVGTEQGIVISCNRKAKTSAEKIVCTFPGHHGPIYALQRNPFYPKNFLTVGDWTARIWSEDSRESSIMWTKYHMAYLTDAAWSPVRPTVFFTTRMDGTLDIWDFMFEQCDPTLSLKVCDEALFCLRVQDNGCLIACGSQLGTTTLLEVSPGLSTLQRNEKNVASSMFERETRREKILEARHREMRLKEKGKAEGRDEEQTDEELAVDLEALVSKAEEEFFDIIFAELKKKEADAIKLTPVPQQPSPEEDQVVEEGEEAAGEEGDEEVEEDLA

SEQ ID NO: 328 - protein, 480 aa, Homo sapiens
MHHWSYPCAVLQLRQPGSALTPLKLPCQSPGGLPGAEVTYMNMTAYNKGRLQSSFWIVDKQHVYIGSAGLDWQSLGQMKELGVIFYNCSCLVLDLQRIFALYSSLKFKSRVPQTWSKRLYGVYDNEKKLQLQLNETKSQAFVSNSPKLFCPKNRSFDIDAIYSVIDDAKQYVYIAVMDYLPISSTSTKRSSITRSALDGSLRWSSMKYMTGGRETNFEHKAEMIFPVVLSFMGIKPDKENCSVDPGSRFLPRARGRTYWPDLDAKIREALVLRSVRVRLLLSFWKETDPLTFNFISSLKAICTEIANCSLKVTVTNRALEHAAAHRPPAQMPRRLGPHACPRSLGPRTNPPLETLREKFFDLERENACATKEQKNHTFPRLNRNKYMVTDGAAYIGNFDWVGNDFTQNAGTGLVINQADVRNNRSIIKQLKDVFERDWYSPYAKTLQPTKQPNCSSLFKLKPLSNKTATDDTGGKDPRNV

SEQ ID NO: 329 - protein, 456 aa, Homo sapiens
MSHNTQTNIIFHSPGNEMKTKAPPVGEVTVTAADIMAVDVAEYHLSVIKSPPGWEVGVYAAGALALLGIAAVSLWKLWTSGSFPSPSPFPNYDYRYLQQKYGESCAEAREKRVPAWNAQRASTRGPPSRKGSLSIEDTFESISELGPLELMGRELDLAPYGTLRKSQSADSLNSISSVSNTFGQDFTLGQVEVSMEYDTASHTLNVAVMQGKDLLEREEASFESCFMRVSLLPDEQIVGISRIQRNAYSIFFDEKFSIPLDPTALEEKSLRFSVFGIDEDERNVSTGVVELKLSVLDLPLQPFSGWLYLQDQNKAADAVGEILLSLSYLPTAERLTVVVVKAKNLIWTNDKTTADPFVKVYLLQDGRKMSKKKTAVKRDDPNPVFNEAMIFSVPAIVLQDLSLRVTVAESSSDGRGDNVGHVIIGPSASGMGTTHWNQMLATLRRPVSMWHAVRRN

SEQ ID NO: 330 - protein, 361 aa, Homo sapiens
MATLARLQARSSTVGNQYYFRNSVVDPFRKKENDAAVKIQSWFRGCQVRAYIRHLNRIVTIIQKWWRSFLGRKQYQLTVQVAYYTMMMNLYNAMAVRIQRRWRGYRVRKYLFNYYYLKEYLKVVSETNDAIRKALEEFAEMKEREEKKANLEREEKKRDYQARKMHYLLSTKQIPGIYNSPFRKEPDPWELQLQKAKPLTHRRPKVKQKDSTSLTDWLACTSARSFPRSEILPPINRKQCQGPFRDITEVLEQRYRPLEPTLRVAEPIDELKLAREELRREEWLQNVNDNMFLPFSSYHKNEKYIPSMHLSSKYGPISYKEQFRSENPKKWICDKDFQTVLPSFELFSKYGKLYSKAGQIV

SEQ ID NO: 331 - protein, 1083 aa, Homo sapiens
MKGGIDFAMDLSTRATSMGPRRSLAPADINSRLALANPSSRPAQCQVTAYGTRLQTCSFIPRHQMHPSARPALMVPDSRLSTYRLRFQAGPQEPRLQSYPCGLRSKTYAGTKSDAKDPGSRLASANIASPEFVKMPQLLRNVLCVIETFHKYASEDSNGATLTGRELKQLIQGEFGDFFQPCVLHAVEKNSNLLNIDSNGIISFDEFVLAIFNLLNLCYLDIKSLLSSELRQVTKPEKEKLDDVDVQATTGDGQWTVGTSPTQEKRMLPSGMASSSQLIPEESGAVGNNRVDPWREAKTHNFPGEASEHNDPKNKHLEGDEQSQEVAQDIQTTEDNEGQLKTNKPMAGSKKTSSPTERKGQDKEISQEGDEPAREQSVSKIRDQFGEQEGNLATQSSPPKEATQRPCEDQEVRTEKEKHSNIQEPPLQREDEPSSQHADLPEQAAARSPSQTQKSTDSKDVCRMFDTQEPGKDADQTPAKTKNLGEPEDYGRTSETQEKECETKDLPVQYGSRNGSETSDMRDERKERRGPEAHGTAGQKERDRKTRPLVLETQTQDGKYQELQGLSKSKDAEKGSETQYLSSEGGDQTHPELEGTAVSGEEAEHTKEGTAEAFVNSKNAPAAERTLGARERTQDLAPLEKQSVGENTRVTKTHDQPVEEEDGYQGEDPESPFTQSDEGSSETPNSLASEEGNSSSETGELPVQGDSQSQGDQHGESVQGGHNNNPDTQRQGTPGEKNRALEAVVPAVRGEDVQLTEDQEQPARGEHKNQGPGTKGPGAAVEPNGHPEAQESTAGDENRKSLEIEITGALDEDFTDQLSLMQLPGKGDSRNELKVQGPSSKEEKGRATEAQNTLLESLDEDNSASLKIQLETKEPVTSEEEDESPQELAGEGGDQKSPAKKEHNSSVPWSSLEKQMQRDQEPCSVERGAVYSSPLYQYLQEKILQQTNVTQEEHQKQVQIAQASGPELCSVSLTSEISDCSVFFNYSQASQPYTRGLPLDESPAGAQETPAPQALEDKQGVLTIVSPVTVRDNQEIQKNSQYLPMTSLNMVIGNTDPAKEENKTLVMVKQEEAPDSQYLSRAK

SEQ ID NO: 332 - protein, 215 aa, Homo sapiens
MKVLRHKYLINFYRAIESTSRVYIILELAQGGDVLEWIQRYGACSEPLAGKWFSQLTLGIAYLHSKSIVHRDLKLENLLLDKWENVKISDFGFAKMVPSNQPVGCSPSYRQVNCFSHLSQTYCGSFAYACPEILRGLPYNPFLSDTWSMGVILYTLVVAHLPFDDTNLKKLLRETQKEVTFPANHTISQECKVQLLIACVAQWRKTQARPLSPLL

SEQ ID NO: 333 - protein, 252 aa, Homo sapiens
MKVLRHKYLINFYRAIESTSRVYIILELAQGGDVLEWIQRYGACSEPLAGKWFSQLTLGIAYLHSKSIVHRDLKLENLLLDKWENVKISDFGFAKMVPSNQPVGCSPSYRQVNCFSHLSQTYCGSFAYACPEILRGLPYNPFLSDTWSMGVILYTLVVAHLPFDDTNLKKLLRETQKEVTFPANHTISQECKNLILQMLRQATKRATILDIIKDSWVLKFQPEQPTHEIRLLEAMCQLHNTTKQHQSLQITT

SEQ ID NO: 334 - protein, 1378 aa, Homo sapiens
MGSPDQLMVHKGKCIGSDEQLGKLVYNALETATGGFVLLYEWVLQWQKKMGPFLTSQEKEKIDKCKKQIQGTETEFNSLVKLSHPNVVRYLAMNLKEQDDSIVVDILVEHISGVSLAAHLSHSGPIPVHQLRRYTAQLLSGLDYLHSNSVVHKVLSASNVLVDAEGTVKITDYSISKRLADICKEDVFEQTRVRFSDNALPYKTGKKGDVWRLGLLLLSLSQGQECGEYPVTIPSDLPADFQDFLKKCVCLDDKERWSPQQLLKHSFINPQPKMPLVEQSPEDSGGQDYVETVIPSNRLPSAAFFSETQRQFSRYFIEFEELQLLGKGAFGAVIKVQNKLDGCCYAVKRIPINPASRQFRRIKGEVTLLSRLHHENIVRYYNAWIERHERPAGPGTPPPDSGPLAKDDRAARGQPASDTDGLDSVEAAAPPPILSSSVEWSTSGERSASARFPATGPGSSDDEDDDEDEHGGVFSQSFLPASDSESDIIFDNEDENSKSQNQDEDCNEKNGCHESEPSVTTEAVHYLYIQMEYCEKSTLRDTIDQGLYRDTVRLWRLFREILDGLAYIHEKGMIHRDLKPVNIFLDFDDHVKIGDFGLATDHLAFSADSKQDDQTGDLIKSDPSGHLTGMVGTALYVSPEVQGSTKSAYNQKVDLFSLGIIFFEMSYHPMVTASERIFVLNQLRDPTSPKFPEDFDDGEHAKQKSVISWLLNHDPAKRPTATELLKSELLPPPQMEESELHEVLHHTLTNVDGKAYRTMMAQIFSQRISPAIDYTYDSDILKGNFSIRTAKMQQHVCETIIRIFKRHGAVQLCTPLLLPRNRQIYEHNEAALFMDHSGMLVMLPFDLRIPFARYVARNNILNLKRYCIERVFRPRKLDRFHPKELLECAFDIVTSTTNSFLPTAEIIYTIYEIIQEFPALQERNYSIYLNHTMLLKAILLHCGIPEDKLSQVYIILYDAVTEKLTRREVEAKFCNLSLSSNSLCRLYKFIEQKGDLQDLMPTINSLIKQKTGIAQLVKYGLKDLEEVVGLLKKLGIKLQVLINLGLVYKVQQHNGIIFQFVAFIKRRQRAVPEILAAGGRYDLLIPQFRGPQALGPVPTAIGVSIAIDKISAAVLNMEESVTISSCDLLVVSVGQMSMSRAINLTQKLWTAGITAEIMYDWSQSQEELQEYCRHHEITYVALVSDKEGSHVKVKSFEKERQTEKRVLETELVDHVLQKLRTKVTDERNGREASDNLAVQNLKGSFSNASGLFEIHGATVVPIVSVLAPEKLSASTRRRYETQVQTRLQTSLANLHQKSSEIEILAVDLPKETILQFLSLEWDADEQAFNTTVKQLLSRLPKQRYLKLVCDEIYNIKVEKKVSVLFLYSYRDDYYRILF

SEQ ID NO: 335 - protein, 1558 aa, Homo sapiens
MREAAAALVPPPAFAVTPAAAMEEPPPPPPPPPPPPEPETESEPECCLAARQEGTLGDSACKSPESDLEDFSDETNTENLYGTSPPSTPRQMKRMSTKHQRNNVGRPASRSNLKEKMNAPNQPPHKDTGKTVENVEEYSYKQEKKIRAALRTTERDHKKNVQCSFMLDSVGGSLPKKSIPDVDLNKPYLSLGCSNAKLPVSVPMPIARPARQTSRTDCPADRLKFFETLRLLLKLTSVSKKKDREQRGQENTSGFWLNRSNELIWLELQAWHAGRTINDQDFFLYTARQAIPDIINEILTFKVDYGSFAFVRDRAGFNGTSVEGQCKATPGTKIVGYSTHHEHLQRQRVSFEQVKRIMELLEYIEALYPSLQALQKDYEKYAAKDFQDRVQALCLWLNITKDLNQKLRIMGTVLGIKNLSDIGWPVFEIPSPRPSKGNEPEYEGDDTEGELKELESSTDESEEEQISDPRVPEIRQPIDNSFDIQSRDCISKKLERLESEDDSLGWGAPDWSTEAGFSRHCLTSIYRPFVDKALKQMGLRKLILRLHKLMDGSLQRARIALVKNDRPVEFSEFPDPMWGSDYVQLSRTPPSSEEKCSAVSWEELKAMDLPSFEPAFLVLCRVLLNVIHECLKLRLEQRPAGEPSLLSIKQLVRECKEVLKGGLLMKQYYQFMLQEVLEDLEKPDCNIDAFEEDLHKMLMVYFDYMRSWIQMLQQLPQASHSLKNLLEEEWNFTKEITHYIRGGEAQAGKLFCDIAGMLLKSTGSFLEFGLQESCAEFWTSADDSSASDEIRRSVIEISRALKELFHEARERASKALGFAKMLRKDLEIAAEFRLSAPVRDLLDVLKSKQYVKVQIPGLENLQMFVPDTLAEEKSIILQLLNAAAGKDCSKDSDDVLIDAYLLLTKHGDRARDSEDSWGTWEAQPVKVVPQVETVDTLRSMQVDNLLLVVMQSAHLTIQRKAFQQSIEGLMTLCQEQTSSQPVIAKALQQLKNDALELCNRISNAIDRVDHMFTSEFDAEVDESESVTLQQYYREAMIQGYNFGFEYHKEVVRLMSGEFRQKIGDKYISFARKWMNYVLTKCESGRGTRPRWATQGFDFLQAIEPAFISALPEDDFLSLQALMNECIGHVIGKPHSPVTGLYLAIHRNSPRPMKVPRCHSDPPNPHLIIPTPEGFRGSSVPENDRLASIAAELQFRSLSRHSSPTEERDEPAYPRGDSSGSTRRSWELRTLISQSKDTASKLGPIEAIQKSVRLFEEKRYREMRRKNIIGQVCDTPKSYDNVMHVGLRKVTFKWQRGNKIGEGQYGKVYTCISVDTGELMAMKEIRFQPNDHKTIKETADELKIFEGIKHPNLVRYFGVELHREEMYIFMEYCDEGTLEEVSRLGLQEHVIRLYSKQITIAINVLHEHGIVHRDIKGANIFLTSSGLIKLGDFGCSVKLKNNAQTMPGEVNSTLGTAAYMAPEVITRAKGEGHGRAADIWSLGCVVIEMVTGKRPWHEYEHNFQIMYKVGMGHKPPIPERLSPEGKDFLSHCLESDPKMRWTASQLLDHSFVKVCTDEE

SEQ ID NO: 336 - protein, 433 aa, Homo sapiens
MYFGSDKDPFPKGVIPLTAIEMTRSSKDNKFQVITGQRVFVFRTESEAQRDMWCSTLQSCLKEQRLLGHPRPPQPPRPLRTGMLELRGHKAKVFAALSPGELALYKSEQAFSLGIGICFIELQGCSVRETKSRSFDLLTPHRCFSFTAESGGARQSWAAALQEAVTETLSDYEVAEKIWSNRANRQCADCGSSRPDWAAVNLGVVICKQCAGQHRALGSGISKVQSLKLDTSVWSNEIVQLFIVLGNDRANRFWAGTLPPGEGLHPDATPGPRGEFISRKYRLGLFRKPHPQYPDHSQLLQALCAAVARPNLLKNMTQLLCVEAFEGEEPWFPPAPDGSCPGLLPSDPSPGVYNEVVVRATYSGFLYCSPVSNKAGPSPPRRGRDAPPRLWCVLGAALEMFASENSPEPLSLIQPQDIVCLGVSPPPTDPGDR

SEQ ID NO: 337 - protein, 764 aa, Homo sapiens
MTHTCASGTPKERKLLAAAQQMLRDSQLKVALLRMKISSLEASGSPEPGPELLAEELQHRLHVEAAVAEGAKNVVKLLSSRRTQDRKALAEAQAQLQESSQKLDLLRLALEQLLEQLPPAHPLRSRVTRELRAAVPGYPQPSGTPVKPTALTGTLQVRLLGCEQLLTAVPGRSPAAALASSPSEGWLRTKAKHQRGRGELASEVLAVLKVDNRVVGQTGWGQVAEQSWDQTFVIPLERARELEIGVHWRDWRQLCGVAFLRLEDFLDNACHQLSLSLVPQGLLFAQVTFCDPVIERRPRLQRQERIFSKRRGQDFLRRSQMNLGMAAWGRLVMNLLPPCSSPSTISPPKGCPRTPTTLREASDPATPSNFLPKKTPLGEEMTPPAQAPTASTSPREPTSEETPRTKRPHMEPRTRRGPSPPASPTRKPPRLQDFRCLAVLGRGHFGKVLLVQFKGTGKYYAIKALKKQEVLSRDEIESLYCEKRILEAVGCTGHPFLLSLLACFQTSSHACFVTEFVPGGDPMMQIHEDVFPEPQARFYVACVVLGLQFLHEKKIIYRDLKLDNLLLDAQGFLKIADFGLCKEGIGFGDRTSTFCGTPEFLAPEVLTQEAYTRAVDWWGLGVLLYEMLVGECPFPGDTEEEVFDCIVNMDAPYPGFLSVQGLEFIQKLLQKCPEKRLGAGEQDAEEIKVQPFFRTTNWQALLARTIQPPFVPTLCGPADLRYFEGEFTGLPPALTPPAPHSLLTARQQAAFRDFDFVSERFLEP

SEQ ID NO: 338 - protein, 671 aa, Homo sapiens
MGRPAQALTFAKKHLQISQEIGDRHGELTARMNVAQLQLVLGRLTSPAASEKPDLAGYEAQGARPKRTQRLSAETWDLLRLPLEREQNGDSHHSGDWRGPSRDSLPLPVRSRKYQEGPDAERRPREGSHSPLDSADVRVHVPRTSIPRAPSSDEECFFDLLTKFQSSRMDDQRCPLDDGQAGAAEATAAPTLEDRIAQPSMTASPQTEEFFDLIASSQSRRLDDQRASVGSLPGLRITHSNAGHLRGHGEPQEPGDDFFNMLIKYQSSRIDDQRCPPPDVLPRGPTMPDEDFFSLIQRVQAKRMDEQRVDLAGGPGAGGRRPARAPAAVPAWCELRPCAHRQAHPAPTPGRRSHSHSHVLPRPLPRTGTGHAAPRPPRPRATGSGQAARGGRACFHPGLAPMALSFLPSAPAAGRTGPSACRPRPGAVRLPHPLPQALPVLPCPAKCETLLSPPPSPKVSLSRLLGPPRTGPCSVPPELVLGWPCDRHAPPLQLRPGAGLPPSLSPHSPARGQQPQKAPQTTHGRPGCSGSPEVPPAESQGPAGASTGAGPISKAEGMAGHELRHSKTPSQEKGQGLVLGMLTGSKSSAQSGWEVAPGSVTLTQVGGWSVEAGEASLSSTLQTPHMRTPLLPPAGGDDITALSMGRGLTGHQVRDPRTGRTCWSLRWAPGA

SEQ ID NO: 339 - protein, 495 aa, Homo sapiens
MCTRNLALLFAPSVFQTDGRGEHEVRVLQELIDGYISVFDIDSDQVAQIDLEVSLITTWKDVQLSQAGDLIMEVYIEQQLPDNCVTLKVSPTLTAEELTNQVLEMRGTAAGMDLWVTFEIREHGELERPLHPKEKVLEQALQWCQLPEPCSASLLLKKVPLAQAGCLFTGIRRESPRVGLLRCREEPPRLLGSRFQERFFLLRGRCLLLLKEKKSSKPEREWPLEGAKVYLGIRKKLKPPTPWGFTLILEKMHLYLSCTDEDEMWDWTTSILKAQHDDQQPVVLRRHSSSDLARQKFGTMPLLPIRGDDSGATLLSANQTLRRLHNRRTLSMFFPMKSSQGSVEEQEELEEPVYEEPVYEEVGAFPELIQDTSTSFSTTREWTVKPENPLTSQKSLDQPFLSKSSTLGQEERPPEPPPGPPSKSSPQARGSLEEQLLQELSSLILRKGETTAGLGSPSQPSSPQSPSPTGLPTQTPGFPTQPPCTSSPPSSQPLT

SEQ ID NO: 340 - protein, 369 aa, Homo sapiens [sequence omitted]

SEQ ID NO: 341 - protein, 418 aa, Homo sapiens
MPMLLPHPHQHFLKGLLRAPFRCYHFIFHSSTHLGSGIPCAQPFNSLGLHCTKWMLLSDGLKRKLCVQTTLKDHTEGLSDKEQRFVDKLYTGLIQGQRACLAEAITLVESTHSRKKELAQVLLQKVLLYHREQEQSNKGKPLAFRVGLSGPPGAGKSTFIEYFGKMLTERGHKLSVLAVDPSSCTSGGSLLGDKTRMTELSRDMNAYIRPSPTRGTLGGVTRTTNEAILLCEGAGYDIILIETVGVGQSEFAVADMVDMFVLLLPPAGGDELQGIKRGIIEMADLVAVTKSDGDLIVPARRIQAEYVSALKLLRKRSQVWKPKVIRISARSGEGISEMWDKMKDFQDLMLASGELTAKRRKQQKVWMWNLIQESVLEHFRTHPTVREQIPLLEQKVLIGALSPGLAADFLLKAFKSRD

SEQ ID NO: 342 - protein, 736 aa, Homo sapiens
MGNPENIEDAYVAVIRPKNTASLNSREYRAKSYEILLHEVPIEGQKKKRKKVLLETKLQGNSEITQGILDYVVETTKPISPANQGIRGKRVVLMKKFPLDGEKMGREASLFIVPSVVKDNTKYTYTPGCPIFYCLQDIMRVCSESSTHFATLTARMLIALDKWLDERHAQSHFIPALFRPSPLERIKTNVINPAYATESGQTENSLHMGYSALEIKSKMLALEKADTCIYNPLFGSDLQYTNRVDKVVINPYFGLGAPDYSKIQIPKQEKWQRSMSSVTEDKERQWVDDFPLHRSACEGDSELLSRLLSERFSVNQLDSDHWAPIHYACWYGKVEATRILLEKGKCNPNLLNGQLSSPLHFAAGGGHAEIVQILLNHPETDRHITDQQGRSPLNICEENKQNNWEEAAKLLKEAINKPYEKVRIYRMDGSYRSVELKHGNNTTVQQIMEGMRLSQETQQYFTIWICSENLSLQLKPYHKPLQHVRDWPEILAELTNLDPQRETPQLFLRRDVRLPLEVEKQIEDPLAILILFDEARYNLLKGFYTAPDAKLITLASLLLQIVYGNYESKKHKQGFLNEENLKSIVPVTKLKSKAPHWTNRILHEYKNLSTSEGVSKEMHHLQRMFLQNCWEIPTYGAAFFTGQIFTKASPSNHKVIPVYVGVNIKGLHLLNMETKALLISLKYGCFMWQLGDTDTCFQIHSMENKMSFIVHTKQAGLVVKLLMKLNGQLMPTERNS

SEQ ID NO: 343 - protein, 897 aa, Homo sapiens
MERMDSSLPEEEEDEDKEAINGSGNAENRERHSESSDWMKTVPSYNQTNSSMDFRNYMMRDETLEPLPKNWEMAYTDTGMIYFIDHNTKTTTWLDPRLCKKAKAPEDCEDGELPYGWEKIEDPQYGTYYVDHLNQKTQFENPVEEAKRKKQLGQVEIGSSKPDMEKSHFTRDPSQLKGVLVRASLKKSTMGFGFTIIGGDRPDEFLQVKNVLKDGPAAQDGKIAPGDVIVDINGNCVLGHTHADVVQMFQLVPVNQYVNLTLCRGYPLPDDSEDPVVDIVAATPVINGQSLTKGETCMNPQDFKPGAMVLEQNGKSGHTLTGDGLNGPSDASEQRVSMASSGSSQPELVTIPLIKGPKGFGFAIADSPTGQKVKMILDSQWCQGLQKGDIIKEIYHQNVQNLTHLQVVEVLKQFPVGADVPLLILRGGPPSPTKTAKMKTDKKENAGSLEAINEPIPQPMPFPPSIIRSGSPKLDPSEVYLKSKTLYEDKPPNTKDLDVFLRKQESGFGFRVLGGDGPDQSIYIGAIIPLGAAEKDGRLRAADELMCIDGIPVKGKSHKQVLDLMTTAARNGHVLLTVRRKIFYGEKQPEDDSSQAFISTQNGSPRLNRAEVPARPAPQEPYDVVLQRKENEGFGFVILTSKNKPPPGVIPHKIGRVIEGSPADRCGKLKVGDHISAVNGQSIVELSHDNIVQLIKDAGVTVTLTVIAEEEHHGPPSGTNSARQSPALQHRPMGQSQANHIPGDRSALEGEIGKDVSTSYRHSWSDHKHLAQPDTAVISVVGSRHNQNLGCYPVELERGPRGFGFSLRGGKEYNMGLFILRLAEDGPAIKDGRIHVGDQIVEINGEPTQGITHTRAIELIQAGGNKVLLLLRPGTGLIPDHGLAPSGLCSYVKPEQH

SEQ ID NO: 344 - protein, 451 aa, Homo sapiens
MKFMTQSAFERALPILNVALASLHPMTDEQIFQAINAGHIQGEQGWEDFQQRMDALSCFLIKRRDKTRMFCHPSFREWLVWRADGENTAFLCEPRNGHALLAFMFSRQEGKLNRQQTMELGHHILKAHIFKGLSKKTGISSSHLQALWIGYSTEGLSAALASLRNLYTPNVKVSRLLILGGANVNYRTEVLNNAPILCVQSHLGHEEVVTLLLEFGACLDGTSENGMTALCYAAAAGHMKLVCLLTKKGVRVDHLDKKGQCALVHSALRGHGDILQYLLTCEWSPGPPQPGTLRKSHALQQALTAAASMGHSSVVQCLLGMEKEHEVEVNGTDTLWGETALTAAAGRGKLEVCELLLGHGAAVSRTNRRGVPPLFCAARQGHWQIVRLLLERGCDVNLSDKQGRTPLMVAACEGHLSTVEFLLSKGSSVMPLKGFFWTDTERTSADPFSAF

SEQ ID NO: 345 - protein, 622 aa, Homo sapiens
MKFMTQSAFERALPILNVALASLHPMTDEQIFQAINAGHIQGEQGWEDFQQRMDALSCFLIKRRDKTRMFCHPSFREWLVWRADGENTAFLCEPRNGHALLAFMFSRQEGKLNRQQTMELGHHILKAHIFKGLSKKTGISSSHLQALWIGYSTEGLSAALASLRNLYTPNVKVSRLLILGGANVNYRTEVLNNAPILCVQSHLGHEEVVTLLLEFGACLDGTSENGMTALCYAAAAGHMKLVCLLTKKGVRVDHLDKKGQCALVHSALRGHGDILQYLLTCEWSPGPPQPGTLRKSHALQQALTAAASMGHSSVVQCLLGMEKEHEVEVNGTDTLWGETALTAAAGRGKLEVCELLLGHGAAVSRTNRRGVPPLFCAARQGHWQIVRLLLERGCDVNLSDKQGRTPLMVAACEGHLSTVEFLLSKGAALSSLDKEGLSALSWACLKGHRAVVQYLVEEGAAIDQTDKNGRTPLDLAAFYGDAETVLYLVEKGAVIEHVDHSGMRPLDRAIGCRNTSVVVALLRKGAKLGNAAWAMATSKPDILIILLQKLMEEGNVMYKKGKMKEAAQRYQYALRKFPREGFGEDMRPFNELRVSLYLNLSRCRRKTNDFGMAEEFASKALE

SEQ ID NO: 346 - protein, 805 aa, Homo sapiens
MAEGSMNPKLLDTWIIHWEQQQTELKLVFKNIPYKPAQTKIFQTCYCEAFNPSSPPLSSLALSFKVSGDCHKQGLTQGLLLLLCGLVEPVGLVPVAPPGQLSTADGGEGDGEGWLPPVWALILCLPLPLRPAHGLAEARTKDLRTAVYNAARDGKGAAAPEAAQQPEPGGTGRADWLGGRRGDAAAHRRLLRPPGRGGVPGGPVRRERGGRWLGALRWRDHGGCAAAVGADHLDVVRSLLRRGASVNCTTRTNSTPLRAACFEGLLEVVRYLVGEHQANLEVANRHGHMCLMISCYKGHREIARYLLEQGAQVNWRSAKGNTALHNCAETSSLEILQLLLGCKASMERDSYGMTPLLPASVTGHTNIVEYLIQEQPGQEQLIGVEAQLRLPQEGSSTSQGCAQPQGAPCCIFSPEVLNGESYQSCCPTSREAAMEALELLGSTYVDKKRDLLGALKHWRRAMELRHQGGEYLPKLEPPQLVLAYDYSREVNTTEELEALITDPDEMRMQALLIRERILGPSHPDTSYYIRYRGAVYADSGNFERCIRLWKYALDMQQSNLEPLSPMTASSFLSFAELFSYVLQDRAAKGSLGTQIGFADLMGVLTKGVREVERALQLPREPGDSAQFTKALAIILHLLYLLEKVECTPSREHLKHQTVYRLLKCAPRGKNGFTPLHMAVDKDTTNVGRYPVGRFPSLHVVKVLLDCGADPDSRDFDNNTPLHIAAQNNCPAIMNALIEAGAHMDATNAFKKTAYELLDEKLLARGTMQPFNYVTLQCLAARALDKNKIPYKGFIPEDLEAFIELH

SEQ ID NO: 347 - protein, 3690 aa, Homo sapiens
MAKRLCAGSALCVRGPRGPAPLLLVGLALLGAARAREEAGGGFSLHPPYFNLAEGARIAASATCGEEAPARGSPRPTEDLYCKLVGGPVAGGDPNQTIRGQYCDICTAANSNKAHPASNAIDGTERWWQSPPLSRGLEYNEVNVTLDLGQVFHVAYVLIKFANSPRPDLWVLERSMDFGRTYQPWQFFASSKRDCLERFGPQTLERITRDDAAICTTEYSRIVPLENGEIVVSLVNGRPGAMNFSYSPLLREFTKATNVRLRFLRTNTLLGHLMGKALRDPTVTRRYYYSIKDISIGGRCVCHGHADACDAKDPTDPFRLQCTCQHNTCGGTCDRCCPGFNQQPWKPATANSANECQSCNCYGHATDCYYDPEVDRRRASQSLDGTYQGGGVCIDCQHHTTGVNCERCLPGFYRSPNHPLDSPHVCRRCNCESDFTDGTCEDLTGRCYCRPNFSGERCDVCAEGFTGFPSCYPTPSSSNDTREQVLPAGQIVNCDCSAAGTQGNACRKDPRVGRCLCKPNFQGTHCELCAPGFYGPGCQPCQCSSPGVADDRCDPDTGQCRCRVGFEGATCDRCAPGYFHFPLCQLCGCSPAGTLPEGCDEAGRCLCQPEFAGPHCDRCRPGYHGFPNCQACTCDPRGALDQLCGAGGLCRCRPGYTGTACQECSPGFHGFPSCVPCHCSAEGSLHAACDPRSGQCSCRPRVTGLRCDTCVPGAYNFPYCEAGSCHPAGLAPVDPALPEAQVPCMCRAHVEGPSCDRCKPGFWGLSPSNPEGCTRCSCDLRGTLGGVAECQPGTGQCFCKPHVCGQACASCKDGFFGLDQADYFGCRSCRCDIGGALGQSCEPRTGVCRCRPNTQGPTCSEPARDHYLPDLHHLRLELEEAATPEGHAVRFGFNPLEFENFSWRGYAQMAPVQPRIVARLNLTSPDLFWLVFRYVNRGAMSVSGRVSVREEGRSATCANCTAQSQPVAFPPSTEPAFITVPQRGFGEPFVLNPGTWALRVEAEGVLLDYVVLLPSAYYEAALLQLRVTEACTYRPSAQQSGDNCLLYTHLPLDGFPSAAGLEALCRQDNSLPRPCPTEQLSPSHPPLITCTGSDVDVQLQVAVPQPGRYALVVEYANEDARQEVGVAVHTPQRAPQQGLLSLHPCLYSTLCRGTARDTQDHLAVFHLDSEASVRLTAEQARFFLHGVTLVPIEEFSPEFVEPRVSCISSHGAFGPNSAACLPSRFPKPPQPIILRDCQVIPLPPGLPLTHAQDLTPAMSPAGPRPRPPTAVDPDAEPTLLREPQATVVFTTHVPTLGRYAFLLHGYQPAHPTFPVEVLINAGRVWQGHANASFCPHGYGCRTLVVCEGQALLDVTHSELTVTVRVPKGRWLWLDYVLVVPENVYSFGYLREEPLDKSYDFISHCAAQGYHISPSSSSLFCRNAAASLSLFYNNGARPCGCHEVGATGPTCEPFGGQCPCHAHVIGRDCSRCATGYWGFPNCRPCDCGARLCDELTGQCICPPRTIPPDCLLCQPQTFGCHPLVGCEECNCSGPGIQELTDPTCDTDSGQCKCRPNVTGRRCDTCSPGFHGYPRCRPCDCHEAGTAPGVCDPLTGQCYCKENVQGPKCDQCSLGTFSLDAANPKGCTRCFCFGATERCRSSSYTRQEFVDMEGWVLLSTDRQVVPHERQPGTEMLRADLRHVPEAVPEAFPELYWQAPPSYLGDRVSSYGGTLRYELHSETQRGDVFVPMESRPDVVLQGNQMSITFLEPAYPTPGHVHRGQLQLVEGNFRHTETRNTVSREELMMVLASLEQLQIRALFSQISSAVFLRRVALEVASPAGQGALASNVELCLCPASYRGDSCQECAPGFYRDVKGLFLGRCVPCQCHGHSDRCLPGSGVCVDCQHNTEGAHCERCQAGFVSSRDDPSAPCVSCPCPLSVPSNNFAEGCVLRGGRTQCLCKPGYAGASCERCAPGFFGNPLVLGSSCQPCDCSGNGDPNLLFSDCDPLTGACRGCLRHTTGPRCEICAPGFYGNALLPGNCTRCDCTPCGTEACDPHSGHCLCKAGVTGRRCDRCQEGHFGFDGCGGCRPCACGPAAEGSECHPQSGQCHCRPGTMGPQCRECAPGYWGLPEQGCRRCQCPGGRCDPHTGRCNCPPGLSGERCDTCSQQHQVPVPGGPVGHSIHCEVCDHCVVLLLDDLERAGALLPAIHEQLRGINASSMAWARLHRLNASIADLQSQLRSPLGPRHETAQQLEVLEQQSTSLGQDARRLGGQAVGTRDQASQLLAGTEATLGHAKTLLAAIRAVDRTLSELMSQTGHLGLANASAPSGEQLLRTLAEVERLLWEMRARDLGAPQAAAEAELAAAQRLLARVQEQLSSLWEENQALATQTRDRLAQHEAGLMDLREALNRAVDATREAQELNSRNQERLEEALQRKQELSRDNATLQATLHAARDTLASVFRLLHSLDQAKEELERLAASLDGARTPLLQRMQTFSPAGSKLRLVEAAEAHAQQLGQLALNLSSIILDVNQDRLTQRAIEASNAYSRILQAVQAAEDAAGQALQQADHTWATVVRQGLVDRAQQLLANSTALEEAMLQEQQRLGLVWAALQGARTQLRDVRAKKDQLEAHIQAAQAMLAMDTDETSKKIAHAKAVAAEAQDTATRVQSQLQAMQENVERWQGQYEGLRGQDLGQAVLDAGHSVSTLEKTLPQLLAKLSILENRGVHNASLALSASIGRVRELIAQARGAASKVKVPMKFNGRSGVQLRTPRDLADLAAYTALKFYLQGPEPEPGQGTEDRFVMYMGSRQATGDYMGVSLRDKKVHWVYQLGEAGPAVLSIDEDIGEQFAAVSLDRTLQFGHMSVTVERQMIQETKGDTVAPGAEGLLNLRPDDFVFYVGGYPSTFTPPPLLRFPGYRGCIEMDTLNEEVVSLYNFERTFQLDTAVDRPCARSKSTGDPWLTDGSYLDGTGFARISFDSQISTTKRFEQELRLVSYSGVLFFLKQQSQFLCLAVQEGSLVLLYDFGAGLKKAVPLQPPPPLTSASKAIQVFLLGGSRKRVLVRVERATVYSVEQDNDLELADAYYLGGVPPDQLPPSLRRLFPTGGSVRGCVKGIKALGKYVDLKRLNTTGVSAGCTADLLVGRAMTFHGHGFLRLALSNVAPLTGNVYSGFGFHSAQDSALLYYRASPDGLCQVSLQQGRVSLQLLRTEVKTQAGFADGAPHYVAFYSNATGVWLYVDDQLQQMKPHRGPPPELQPQPEGPPRLLLGGLPESGTIYNFSGCISNVFVQRLLGPQRVFDLQQNLGSVNVSTGCAPALQAQTPGLGPRGLQASRRSRQPARHPACMLPPHLRTTRDSYQFGGSLSSHLEFVGILARHRNWPSLSMHVLPRSSRGLLLFTARLRPGSPSLALFLSNGHFVAQMEGLGTRLRAQSRQRSRPGRWHKVSVRWEKNRILLVTDGARAWSQEGPHRQHQGAEHPQPHTLFVGGLPASSHSSKLPVTVGFSGCVKRLRLHGRPLGAPTRMAGVTPCILGPLEAGLFFPGSGGVITLDLPGATLPDVGLELEVRPLAVTGLIFHLGQARTPPYLQLQVTEKQVLLRADDGAGEFSTSVTRPSVLCDGQWHRLAVMKSGNVLRLEVDAQSNHTVGPLLAAAAGAPAPLYLGGLPEPMAVQPWPPAYCGCMRRLAVNRSPVAMTRSVEVHGAVGASGCPAA

SEQ ID NO: 348 - protein, 490 aa, Homo sapiens
MEEEGVKEAGEKPRGAQMVDKAGWIKKSSGGLLGFWKDRYLLLCQAQLLVYENEDDQKCVETVELGSYEKCQDLRALLKRKHRFILLRSPGNKVSDIKFQAPTGEEKESWIKALNEGINRGKNKAFDEVKVDKSCALEHVTRDRVRGGQRRRPPTRVHLKEVASAASDGLLRLDLDVPDSGPPVFAPSNHVSEAQPRETPRPLMPPTKPFLAPETTSPGDRVETPVGERAPTPVSASSEVSPESQEDSETPAEEDSGSEQPPNSVLPDKLKVSWENPSPQEAPAAESAEPSQAPCSETSEAAPREGGKPPTPPPKILSEKLKASMGEMQASGPPAPGTVQVSVNGMDDSPEPAKPSQAEGTPGTPPKDATTSTALPPWDLPPQFHPRCSSLGDLLGEGPRHPLQPRERLYRAQLEVKVASEQTEKLLNKVLGSEPAPVSAETLLSQAVEQLRQATQVLQEMRDLGELSQEAPGLREKRKELVTLYRRSAP

SEQ ID NO: 349 - protein, 268 aa, Homo sapiens
MEDFLLSNGYQLGKTIGEGTYSKVKEAFSKKHQRKVAIKVIDKMGGPEEFIQRFLPRELQIVRTLDHKNIIQVYEMLESADGKICLVMELAEGGDVFDCVLNGGPLPESRAKALFRQMVEAIRYCHGCGVAHRDLKCENALLQGFNLKLTDFGFAKVLPKSHRELSQTFCGSTAYAAPEVLQGIPHDSKKGDVWSMGVVLYVMLCASLPFDDTDIPKMLWQQQKGVSFPTHLSISADCQDLLKRLLEPDMILRPSIEEVSWHPWLAST

SEQ ID NO: 350 - protein, 394 aa, Homo sapiens
MGPRKKSVKTCIMNNEIPEEMTADETKDYMNQLSHEVLCHIFRYLPLQDIMCMECLSRKLKEAVTLYLRVVRVVDLCAGRWWEYMPSGFTDASFLTLLKKMPDVEQLYGLHPRYLERRRVRGHEAFSIPGVLEALQACPNLVGVETSHLELVESIWTYMPHVHILGKFRNRNGAFPIPPENKLKIPIGAKIQTLHLVGVNVPEIPWIPMLRHLYMKWVRLTKPQPFKDFLCISLRTFVMRNCAGPTNSLKYVPLVTGLASARNLEHLEMVRVPFLGGLIQHVVEDSWRSGGFRNLHTIVLGACKNALEVDLGYLNITAARRLHEVRIQPSLTKDGVFSALKMAELEFPQFETLHLGYVDEFLLQSKIYPILIPRITVRNLLDKLKSELGCAMSF

SEQ ID NO: 351 - protein, 949 aa, Homo sapiens
MPQLLRNVLCVIETFHKYASEDSNGATLTGRELKQLIQGEFGDFFQPCVLHAVEKNSNLLNIDSNGIISFDEFVLAIFNLLNLCYLDIKSLLSSELRQVTKPEKEKLDDVDVQATTGDGQWTVGTSPTQEKRMLPSGMASSSQLIPEESGAVGNNRVDPWREAKTHNFPGEASEHNDPKNKHLEGDEQSQEVAQDIQTTEDNEGQLKTNKPMAGSKKTSSPTERKGQDKEISQEGDEPAREQSVSKIRDQFGEQEGNLATQSSPPKEATQRPCEDQEVRTEKEKHSNIQEPPLQREDEPSSQHADLPEQAAARSPSQTQKSTDSKDVCRMFDTQEPGKDADQTPAKTKNLGEPEDYGRTSETQEKECETKDLPVQYGSRNGSETSDMRDERKERRGPEAHGTAGQKERDRKTRPLVLETQTQDGKYQELQGLSKSKDAEKGSETQYLSSEGGDQTHPELEGTAVSGEEAEHTKEGTAEAFVNSKNAPAAERTLGARERTQDLAPLEKQSVGENTRVTKTHDQPVEEEDGYQGEDPESPFTQSDEGSSETPNSLASEEGNSSSETGELPVQGDSQSQGDQHGESVQGGHNNNPDTQRQGTPGEKNRALEAVVPAVRGEDVQLTEDQEQPARGEHKNQGPGTKGPGAAVEPNGHPEAQESTAGDENRKSLEIEITGALDEDFTDQLSLMQLPGKGDSRNELKVQGPSSKEEKGRATEAQNTLLESLDEDNSASLKIQLETKEPVTSEEEDESPQELAGEGGDQKSPAKKEHNSSVPWSSLEKQMQRDQEPCSVERGAVYSSPLYQYLQEKILQQTNVTQEEHQKQVQIAQASGPELCSVSLTSEISDCSVFFNYSQASQPYTRGLPLDESPAGAQETPAPQALEDKQGVLTIVSPVTVRDNQEIQKNSQYLPMTSLNMVIGNTDPAKEENKTLVMVKQEEAPDSQYLSRAK

SEQ ID NO: 352 - protein, 1202 aa, Homo sapiens
MGREQDLILAVKNGDVTGVQKLVAKVKATKTKLLGSTKRLNVNYQDADGFSALHHAALGGSLELIALLLEAQATVDIKDSNGMRPLHYAAWQGRLEPVRLLLRASAAVNAASLDGQIPLHLAAQYGHYEVSEMLLQHQSNPCLVNKAKKTPLDLACEFGRLKVAQLLLNSHLCVALLEGEAKDPCDPNYTTPLHLAAKNGHREVIRQLLRAGIEINRQTKTGTALHEAALYGKTEVVRLLLEGGVDVNIRNTYNQTALDIVNQFTTSQASREIKQLLREASGILKVRALKDFWNLHDPTALNVRAGDVITVLEQHPDGRWKGHIHESQRGTDRIGYFPPGIVEVVSKRVGIPAARLPSAPTPLRPGFSRTPQPPAEEPPHPLTYSQLPRVGLSPDSPAGDRNSVGSEGSVGSIRSAGSGQSSEGTNGHGPGLLIENAQPLPSAGEDQVLPGLHPPSLADNLSHRPLANCRSGEQIFTQDVRPEQLLEGKDAQAIHNWLSEFQLEGYTAHFLQAGYDVPTISRMTPEDLTAIGVTKPGHRKKIASEIAQLSIAEWLPSYIPTDLLEWLCALGLPQYHKQLVSSGYDSMGLVADLTWEELQEIGVNKLGHQKKLMLGVKRLAELRRGLLQGEALSEGGRRLAKGPELMAIEGLENGEGPATAGPRLLTFQGSELSPELQAAMAGGGPEPLPLPPARSPSQESIGARSRGSGHSQEQPAPQPSGGDPSPPQERNLPEGTERPPKLCSSLPGQGPPPYVFMYPQGSPSSPAPGPPPGAPWAFSYLAGPPATPPDPPRPKRRSHSLSRPGPTEGDAEGEAEGPVGSTLGSYATLTRRPGRSALVRTSPSVTPTPARGTPRSQSFALRARRKGPPPPPPKRLSSVSGPSPEPPPLDGSPGPKEGATGPRRRTLSEPAGPSEPPGPPAPAGPASDTEEEEPGPEGTPPSRGSSGEGLPFAEEGNLTIKQRPKPAGPPPRETPVPPGLDFNLTESDTVKRRPKCREREPLQTALLAFGVASATPGPAAPLPSPTPGESPPASSLPQPEPSSLPAQGVPTPLAPSPAMQPPVPPCPGPGLESSAASRWNGETEPPAAPAALLKVPGAGTAPKPVSVACTQLAFSGPKLAPRLGPRPVPPPRPESTGTVGPGQAQQRLEQTSSSLAAALRAAEKSIGTKEQEGTPSASTKHILDDISTMFDALADQLDAMLD

SEQ ID NO: 353 - protein, 402 aa, Homo sapiens
MFFYLSKKISIPNNVKLQCVSWNKEQGFIACGGEDGLLKVLKLETQTDDAKLRGLAAPSNLSMNQTLEGHSGSVQVVTWNEQYQKLTTSDENGLIIVWMLYKGSWIEEMINNRNKSVVRSMSWNADGQKICIVYEDGAVIVGSVDGNRIWGKDLKGIQLSHVTWSADSKVLLFGMANGEIHIYDNQGNFMIKMKLSCLVNVTGAISIAGIHWYHGTEGYVEPDCPCLAVCFDNGRCQIMRHENDQNPVLIDTGMYVVGIQWNHMGSVLAVAGFQKAAMQDKDVNIVQFYTPFGEHLGTLKVPGKEISALSWEGGGLKIALAVDSFIYFANIRPNYKWGYCSNTVVYAYTRPDRPEYCVVFWDTKNNEKYVKYVKGLISITTCGDFCILATKADENHPQVGVS

SEQ ID NO: 354 - protein, 291 aa, Homo sapiens
MGKGDVLEAAPTTTAYHSLMDEYGYEVGKAIGHGSYGSVYEAFYTKQKVMVAVKIISKKKASDDYLNKFLPREIQVMKVLRHKYLINFYRAIESTSRVYIILELAQGGDVLEWIQRYGACSEPLAGKWFSQLTLGIAYLHSKSIVHRDLKLENLLLDKWENVKISDFGLAKMVPSNQPVGCSPSYRQVNCFSHLSQTYCGSFAYACPEILRGLPYNPFLSDTWSMGVILYTLVVAHLPFDDTNLKKLLRETQKEVTFPANHTISQECKVQLLIACVAQWRKTQARPLSPLL

SEQ ID NO: 355 - protein, 248 aa, Homo sapiens
MLRNNKTIIIKYFLNLINGAFLVLGLLFMGFGAWLLLDRNNFLTAFDENNHFIVPISQILIGMGSSTVLFCLLGYIGIHNEIRWLLIVYAVLITWTFAVQVVLSAFIITKKEEVQQLWHDKIDFVISEYGSKDKPEDITKWTILNALQKTLQCCGQHNYTDWIKNKNKENSGQVPCSCTKSTLRKWFCDEPLNATYLEGCENKISAWYNVNVLTLIGINFGLLTSEVFQVSLTVCFFKNIKNIIHAEM

SEQ ID NO: 356 - protein, 1186 aa, Homo sapiens
MKKFNFRKVLDGLTASSPGSGSSSGSNSGGGAGSGSVHPAGTAGVLREEIQETLTSEYFQICKTVRHGFPHQPTALAFDPVQKILAIGTRTGAIRILGRPGVDCYCQHESGAAVLQLQFLINEGALVSASSDDTLHLWNLRQKRPAILHSLKFNRERITYCHLPFQSKWLYVGTERGNTHIVNIESFILSGYVIMWNKAIELSTKTHPGPVVHLSDSPRDEGKLLIGYENGTVVFWDLKSKRAELRVYYDEAIHSIDWHHEGKQFMCSHSDGSLTLWNLKSPSRPFQTTIPHGKSQREGRKSESCKPILKVEYKTCKNSEPFIIFSGGLSYDKACRRPSLTIMHGKAITVLEMDHPIVEFLTLCETPYPNEFQEPYAVVVLLEKDLIVVDLTQSNFPIFENPYPMDIHESPVTCTAYFADCPPDLILVLYSIGVKHKKQGYSNKEWPISGGAWNLGAQTYPEIIITGHADGSIKFWDASAITLQMLYKLKTSKVFEKQKVGEGKQTCEIVEEDPFAIQMIYWCPESRIFCVSGVSAYVIIYKFSRHEITTEIVSLEVRLQYDVEDIITPEPETSPPFPDLSAQLPSSRSLSGSTNTVASEGVTKDSIPCLNVKTRPVRMPPGYQAELVIQLVWVDGEPPQQITSLAVSSAYGIVAFGNCNGLAVVDFIQKTVLLSMGTIDLYRSSDLYQRQPRSPRKNKQFIADNFCMRGLSNFYPDLTKRIRTSYQSLTELNDSPVPLELERCKSPTSDHVNGHCTSPTSQSCSSGKRLSSADVSKVNRWGPGRPPFRKAQSAACMEISLPVTTEENRENSYNRSRSSSISSIDKDSKEAITALYFMDSFARKNDSTISPCLFVGTSLGMVLIISLNLPLADEQRFTEPVMVLPSGTFLSLKGAVLTFSCMDRMGGLMQPPYEVWRDPNNIDENEKSWRRKVVMNSSSASQEIGDHQYTIICSEKQAKVFSLPSQTCLYVHNITETSFILQANVVVMCSSACLACFCANGHIMIMSLPSLRPMLDVNYLPLTDMRIARTFCFTNEGQALYLVSPTEIQRLTYSQEMCDNLQDMLGDLFTPIETPEAQNRGFLKGLFGGSGQTFDREELFGEASAGKASRSLAQHIPGPGSIEGMKGAAGGVMGELTRARIALDERGQRLGELEEKTAGMMTSAEAFSKHAHELMLKYKDKKWYQF

SEQ ID NO: 357 - protein, 528 aa, Homo sapiens
MPLPGGLWWLLCCRRGFTLLHRDYGDGELSGDGDEDEDEETFELRTPSPAGGGRGPLEVTLTQPVRSGPVSNRLQSWEETWSLIPEKGLPEDDPDIVVKGWLYREPRGGGARPWLPPRRAWFVLTRDSLDQFSSSGKGARRLGSLVLTSLCSVTGPERRRKETGLWSVTVSGRKHSVRLCSPRQAEAERWGVALREVIASKAPLETPTQLLLRDIQESCGDPEAVALIYLRNPILRHTSGALYAPLLPLPYGVSAPGPGYAPLREEAVRLFLALQALEGARRPGPLMQGVLQTCRDLPALRDELFLQLAKQTSGPAGPPGLPATQDPAALRYWQLLTCMSCTFRPGGAVRGHLLGHLERTEQALPDSELAEYARFIRKALGRTRGRELVPSLAEISALSQRQELLCTVHCPGAGACAVAIDSHTTAGEVARELVGRLGLARSRNAFALYEQRGAQERALAGGTLVADVLTSLAAEEAGLEDSPDSGWRLCLRLHGPLHPEGLSPDGHELPRGHDFPPACSLGQDCSEI

SEQ ID NO: 358 - protein, 590 aa, Homo sapiens
MSGDYEDDLCRRALILVSDLCARVRDADTNDRCQEFNDRIRGYPRGPDADISVSLLSVIVTFCGIVLLGVSLFVSWKLCWVPWRDKGGSAVGGGPLRKDLGPGVGLAGLVGGGGHHLAAGLGGHPLLGGPHHHAHAAHHPPFAELLEPGSLGGSDTPEPSYLDMDSYPEAAAAAVAAGVKPSQTSPELPSEGGAGSGLLLLPPSGGGLPSAQSHQQVTSLAPTTRYPALPRPLTQQTLTSQPDPSSEERPPALPLPLPGGEEKAKLIGQIKPELYQGTGPGGRRSGGGPGSGEAGTGAPCGRISFALRYLYGSDQLVVRILQALDLPAKDSNGFSDPYVKIYLLPDRKKKFQTKVHRKTLNPVFNETFQFSVPLAELAQRKLHFSVYDFDRFSRHDLIGQVVLDNLLELAEQPPDRPLWRDIVEGGSEKADLGELNFSLCYLPTAGRLTVTIIKASNLKAMDLTGFSDPYVKASLISEGRRLKKRKTSIKKNTLNPTYNEALVFDVAPESVENVGLSIAVVDYDCIGHNEVIGVCRVGPDAADPHGREHWAEMLANPRKPVEHWHQLVEEKTVTSFTKGSKGLSEKENSE

SEQ ID NO: 359 - protein, 2432 aa, Homo sapiens
MDMSDPNFWTVLSNFTLPHLRSGNRLRRTQSCRTSNRKSLIGNGQSPALPRPHSPLSAHAGNSPQDSPRNFSPSASAHFSFARRNDRTDGRRWSLASLPSSGYGTNTPSSTVSSSCSSQEKLHQLPYQPTPDELHFLSKHFCTTESIATENRCRNTPMRPRSRSLSPGRSPACCDHEIIMMNHVYKERFPKATAQMEERLKEIITSYSPDNVLPLADGVLSFTHHQIIELARDCLDKSHQGLITSRYFLELQHKLDKLLQEAHDRSESGELAFIKQLVRKILIVIARPARLLECLEFDPEEFYYLLEAAEGHAKEGQGIKTDIPRYIISQLGLNKDPLEEMAHLGNYDSGTAETPETDESVSSSNASLKLRRKPRESDFETIKLISNGAYGAVYFVRHKESRQRFAMKKINKQNLILRNQIQQAFVERDILTFAENPFVVSMYCSFETRRHLCMVMEYVEGGDCATLMKNMGPLPVDMARMYFAETVLALEYLHNYGIVHRDLKPDNLLVTSMGHIKLTDFGLSKVGLMSMTTNLYEGHIEKDAREFLDKQVCGTPEYIAPEVILRQGYGKPVDWWAMGIILYEFLVGCVPFFGDTPEELFGQVISDEINWPEKDEAPPPDAQDLITLLLRQNPLERLGTGGAYEVKQHRFFRSLDWNSLLRQKAEFIPQLESEDDTSYFDTRSEKYHHMETEEEDDTNDEDFNVEIRQFSSCSHRFSKVFSSIDRITQNSAEEKEDSVDKTKSTTLPSTETLSWSSEYSEMQQLSTSNSSDTESNRHKLSSGLLPKLAISTEGEQDEAASCPGDPHEEPGKPALPPEECAQEEPEVTTPASTISSSTLSVGSFSEHLDQINGRSECVDSTDNSSKPSSEPASHMARQRLESTEKKKISGKVTKSLSASALSLMIPGDMFAVSPLGSPMSPHSLSSDPSSSRDSSPSRDSSAASASPHQPIVIHSSGKNYGFTIRAIRVYVGDSDIYTVHHIVWNVEEGSPACQAGLKAGDLITHINGEPVHGLVHTEVIELLLKSGNKVSITTTPFENTSIKTGPARRNSYKSRMVRRSKKSKKKESLERRRSLFKKLAKQPSPLLHTSRSFSCLNRSLSSGESLPGSPTHSLSPRSPTPSYRSTPDFPSGTNSSQSSSPSSSAPNSPAGSGHIRPSTLHGLAPKLGGQRYRSGRRKSAGNIPLSPLARTPSPTPQPTSPQRSPSPLLGHSLGNSKIAQAFPSKMHSPPTIVRHIVRPKSAEPPRSPLLKRVQSEEKLSPSYGSDKKHLCSRKHSLEVTQEEVQREQSQREAPLQSLDENVCDVPPLSRARPVEQGCLKRPVSRKVGRQESVDDLDRDKLKAKVVVKKADGFPEKQESHQKSHGPGSDLENFALFKLEEREKKVYPKAVERSSTFENKASMQEAPPLGSLLKDALHKQASVRASEGAMSDGPVPAEHRQGGGDFRRAPAPGTLQDGLCHSLDRGISGKGEGTEKSSQAKELLRCEKLDSKLANIDYLRKKMSLEDKEDNLCPVLKPKMTAGSHECLPGNPVRPTGGQQEPPPASESRAFVSSTHAAQMSAVSFVPLKALTGRVDSGTEKPGLVAPESPVRKSPSEYKLEGRSVSCLEPIEGTLDIALLSGPQASKTELPSPESAQSPSPSGDVRASVPPVLPSSSGKKNDTTSARELSPSSLKMNKSYLLEPWFLPPSRGLQNSPAVSLPDPEFKRDRKGPHPTARSPGTVMESNPQQREGSSPKHQDHTTDPKLLTCLGQNLHSPDLARPRCPLPPEASPSREKPGLRESSERGPPTARSERSAARADTCREPSMELCFPETAKTSDNSKNLLSVGRTHPDFYTQTQAMEKAWAPGGKTNHKDGPGEARPPPRDNSSLHSAGIPCEKELGKVRRGVEPKPEALLARRSLQPPGIESEKSEKLSSFPSLQKDGAKEPERKEQPLQRHPSSIPPPPLTAKDLSSPAARQHCSSPSHASGREPGAKPSTAEPSSSPQDPPKPVAAHSESSSHKPRPGPDPGPPKTKHPDRSLSSQKPSVGATKGKEPATQSLGGSSREGKGHSKSGPDVFPATPGSQNKASDGIGQGEGGPSVPLHTDRAPLDAKPQPTSGGRPLEVLEKPVHLPRPGHPGPSEPADQKLSAVGEKQTLSPKHPKPSTVKDCPTLCKQTDNRQTDKSPSQPAANTDRRAEGKKCTEALYAPAEGDKLEAGLSFVHSENRLKGAERPAAGVGKGFPEARGKGPGPQKPPTEADKPNGMKRSPSATGQSSFRSTALPEKSLSCSSSFPETRAGVREASAASSDTSSAKAAGGMLELPAPSNRDHRKAQPAGEGRTHMTKSDSLPSFRVSTLPLESHHPDPNTMGGASHRDRALSVTATVGETKGKDPAPAQPPPARKQNVGRDVTKPSPAPNTDRPISLSNEKDFVVRQRRGKESLRSSPHKKAL

SEQ ID NO: 360 - protein, 293 aa, Homo sapiens [sequence omitted]

SEQ ID NO: 361 - protein, 1649 aa, Homo sapiens [sequence omitted]

SEQ ID NO: 362 - protein, 626 aa, Homo sapiens
MESAQYVGAAHNNFLVTASSSGDKIVVSSCKCKPVPLLELAEGQKQTCVNLNSTSMYLVSGGLNNTVNIWDLKSKRVHRSLKDHKDQVTCVTYNWNDCYIASGSLSGEIILHSVTTNLSSTPFGHGSNQSVRHLKYSLFKKSLLGSVSDNGIVTLWDVNSQSPYHNFDSVHKAPASGICFSPVNELLFVTIGLDKRIILYDTSSKKLVKTLVADTPLTAVDFMPDGATLAIGSSRGKIYQYDLRMLKSPVKTISAHKTSVQCIAFQYSTVLTKSSLNKGCSNKPTTVNKRSVNVNAASGGVQNSGIVREAPATSIATVLPQPMTSAMGKGTVAVQEKAGLPRSINTDTLSKETDSGKNQDFSSFDDTGKSSLGDMFSPIRDDAVVNKGSDESIGKGDGFDFLPQLNSVFPPRKNPVTSSTSVLHSSPLNVFMGSPGKEENENRDLTAESKKIYMGKQESKDSFKQLAKLVTSGAESGNLNTSPSSNQTRNSEKFEKPENEIEAQLICEPPINGSSTPNPKIASSVTAGVASSLSEKIADSIGNNRQNAPLTSIQIRFIQNMIQETLDDFREACHRDIVNLQVEMIKQFHMQLNEMHSLLERYSVNEGLVAEIERLREENKRLRAHF

SEQ ID NO: 363 - protein, 258 aa, Homo sapiens
MKTPFGKAAAGQRSRTGAGHGSVSVTMIKRKAAHKKHRSRPTSQPRGNIVGCRIQHGWKDGDEPLTQWKGTVLDQVPVNPSLYLIKYDGFDCVYGLELHRDERVSSLEVLPNRVASSRISDTHLAEIMVGKAVEHIFETEEGSKNEWRGMVLAQAPVMNTWFYITYEKDPVLYMYQLLDDYKDGDLRILQDSNDSPLAEREPGEVIDSLVGKQVEYAKDDGSKRTGMVIHQVEAKPSVYFIKFDDDFHIYVYDLVKTS

SEQ ID NO: 364 - protein, 571 aa, Homo sapiens
MAARWSSENVVVEFRDSQATAMSVDCLGQHAVLSGRRFLYIVNLDAPFEGHRKISRQSKWDIGAVQWNPHDSFAHYFAASSNQRVDLYKWKDGSGEVGTTLQGHTRVISDLDWAVFEPDLLVTSSVDTYIYIWDIKDTRKPTVALSAVAGASQVKWNKKNANCLATSHDGDVRIWDKRKPSTAVEYLAAHLSKIHGLDWHPDSEHILATSSQDNSVKFWDYRQPRKYLNILPCQVPVWKARYTPFSNGLVTVMVPQLRRENSLLLWNVFDLNTPVHTFVGHDDVVLEFQWRKQKEGSKDYQLVTWSRDQTLRMWRVDSQMQRLCANDILDGVDEFIESISLLPEPEKTLHTEDTDHQHTASHGEEEALKEDPPRNLLEERKSDQLGLPQTLQQEFSLINVQIRNVNVEMDAADRSCTVSVHCSNHRVKMLVKFPAQYPNNAAPSFQFINPTTITSTMKAKLLKILKDTALQKVKRGQSCLEPCLRQLVSCLESFVNQEDSASSNPFALPNSVTPPLPTFARVTTAYGSYQDANIPFPRTSGARFCGAGYLVYFTRPMTMHRAVSPTEPTPR

SEQ ID NO: 365 - protein, 897 aa, Homo sapiens
MEPGLQGLGDHSVANRRWNAGRGGWIRALPDVLIMELSAVLNSERSLPGALRVAGFEAVGDTGARVLPLIVHLGELYAQLNPEASYLVILLDSKASQAELGWTALPSNGWEEISGVDEHDRPIRTYQVCNVLEPNQDNWLQTGWISRGRGQRIFVELQFTLRDCSSIPGAAGTCKETFNVYYLETEADLGRGRPRLGGSRPRKIDTIAADESFTQGDLGERKMKLNTEVREIGPLSRRGFHLAFQDVGACVALVSVRVYYKQCRATVRGLATFPATAAESAFSTLVEVAGTCVAHSEGEPGSPPRMHCGADGEWLVPVGRCSCSAGFQERGDFCEAPWEEDEIRRDRVEPQSVSLSWREPIPAGAPGANDTEYEIRYYEKGQSEQTYSMVKTGAPTVTVTNLKPATRYVFQIRAASPGPSWEAQSFNPSIEVQTLGEAASGSRDQSPAIVVTVVTISALLVLGSVMSVLAIWRSYGKGGGDAHDEEELYFHWRFGELCCGCLQLPGRQELLVAVHMLRDSASDSQRLGFLAEALTLGQFDHSHIVRLEGVVTREDPGLGRRMARLGSLVLVLALEAQSGTLGGKLVCVRSGVDNLACVFPSLGTGSTLMIVTEYMSHGALDGFLRRHEGQLVAGQLMGLLPGLASAMKYLSEMGYVHRGLAARHVLVSSDLVCKISGFGRGPRDRSEAVYTTMSGRSPALWAAPETLQFGHFSSASDVWSFGIIMWEVMAFGERPYWDMSGQDVIKAVEDGFRLPPPRNCPNLLHRLMLDCWQKDPGERPRFSQIHSILSKMVQDPEPPKCALTTCPRPPTPLADRAFSTFPSFGSVGAWLEALDLCRYKDSFAAAGYGSLEAVAEMTAQDLVSLGISLAEHREALLSGISALQARVLQLQGQGVQV

SEQ ID NO: 366 - protein, 863 aa, Homo sapiens
MLQGTCSVLLLWGILGAIQAQQQEVISPDTTERNNNCPEKTDCPIHVYFVLDTSESVTMQSPTDILLFHMKQFVPQFISQLQNEFYLDQVALSWRYGGLHFSDQVEVFSPPGSDRASFIKNLQGISSFRRGTFTDCALANMTEQIRQDRSKGTVHFAVVITDGHVTGSPCGGIKLQAERAREEGIRLFAVAPNQNLKEQGLRDIASTPHELYRNDYATMLPDSTEIDQDTINRIIKVMKHEAYGECYKVSCLEIPGPSGPKGYRGQKGAKGNMGEPGEPGQKGRQGDPGIEGPIGFPGPKGVPGFKGEKGEFGADGRKGAPGLAGKNGTDGQKGKLGRIGPPGCKGDPGNRGPDGYPGEAGSPGERGDQGGKGDPGRPGRRGPPGEIGAKGSKGYQGNNGAPGSPGVKGAKGGPGPRGPKGEPGRRGDPGTKGSPGSDGPKGEKGDPGPEGPRGLAGEVGNKGAKGDRGLPGPRGPQGALGEPGKQGSRGDPGDAGPRGDSGQPGPKGDPGRPGFSYPGPRGAPGEKGEPGPRGPEGGRGDFGLKGEPGRKGEKGEPADPGPPGEPGPRGPRGVPGPEGEPGPPGDPGLTECDVMTYVRETCGCCDCEKRCGALDVVFVIDSSESIGYTNFTLEKNFVINVVNRLGAIAKDPKSETGTRVGVVQYSHEGTFEAIQLDDERIDSLSSFKEAVKNLEWIAGGTWTPSALKFAYDRLIKESRRQKTRVFAVVITDGRHDPRDDDLNLRALCDRDVTVTAIGIGDMFHEKHESENLYSIACDKPQQVRNMTLFSDLVAEKFIDDMEDVLCPDPQIVCPDLPCQTELSVAQCTPAARGHRLPAGRLPSGWVSRTSTRPGASWSRWRGG

SEQ ID NO: 367 - protein, 473 aa, Homo sapiens
MSQTSSIGSAESLISLERKKEKNINRDITSRKDLPSRTSNVERKASQQQWGRGNFTEGKVPHIRIENGAAIEEIYTFGRILGKGSFGIVIEATDKETETKWAIKKVNKEKAGSSAVKLLEREVNILKSVKHEHIIHLEQVFETPKKMYLVMELCEDGELKEILDRKGHFSENETRWIIQSLASAIAYLHNNDIVHRDLKLENIMVKSSLIDDNNEINLNIKVTDFGLAVKKQSRSEAMLQATCGTPIYMAPEVISAHDYSQQCDIWSIGVVMYMLLRGEPPFLASSEEKLFELIRKGELHFENAVWNSISDCAKSVLKQLMKVDPAHRITAKELLDNQWLTGNKLSSVRPTNVLEMMKEWKNNPESVEENTTEEKNKPSTEEKLKSYQPWGNVPDANYTSDEEEEKQSTAYEKQFPATSKDNFDMCSSSFTSSKLLPAEIKGEMEKTPVTPSQGTATKYPAKSGALSRTKKKL

SEQ ID NO: 368 - protein, 934 aa, Homo sapiens
MSSDEKGISPAHKTSTPTHRSASSSTSSQRDSRQSIHILERTASSSTEPSVSRQLLEPEPVPLSKEADSWEIIEGLKIGQTNVQKPDKHEGFMLKKRKWPLKGWHKRFFVLDNGMLKYSKAPLDIQKGKVHGSIDVGLSVMSIKKKARRIDLDTEEHIYHLKVKSQDWFDAWVSKLRHHRLYRQNEIVRSPRDASFHIFPSTSTAESSPAANVSVMDGKMQPNSFPWQSPLPCSNSLPATCTTGQSKVAAWLQDSEEMDRCAEDLAHCQSNLVELSKLLQNLEILQRTQSAPNFTDMQANCVDISKKDKRVTRRWRTKSVSKDTKIQLQVPFSATMSPVRLHSSNPNLCADIEFQTPPSHLTDPLESSTDYTKLQEEFCLIAQKVHSLLKSAFNSIAIEKEKLKQMVSEQDHSKGHSTQMARLRQSLSQALNQNAELRSRLNRIHSESIICDQVVSVNIIPSPDEAGEQIHVSLPLSQQVANESRLSMSESVSEFFDAQEVLLSASSSENEASDDESYISDVSDNISEDNTSVADNISRQILNGELTGGAFRNGRRACLPAPCPDTSNINLWNILRNNIGKDLSKVSMPVELNGPLNTLQHLCEEMEYSELLDKASETDDPYERMVLVAAFAVSGYCSTYFRAGSKPFNPVLGETYECIREDKGFRFFSEQVSHHPPISACHCESKNFVFWQDIRWKNKFWGKSMEILPVGTLNVMLPKYGDYYVWNKVTTCIHNILSGRRWIEHYGEVTIRNTKSSVCICKLTFVKVNYWNSNMNEVQGVVIDQEGKAVYRLFGKWHEGLYCGVAPSAKCIWRPGSMPTNYELYYGFTRFAIELNELDPVLKDLLPPTDARFRPDQRFLEEGNLEAAASEKQRVEELQRSRRRYMEENNLEHIPKFFKKVIDANQREAWVSNDTYWELRKDPGFSKVDSPVLW

SEQ ID NO: 369 - protein, 901 aa, Homo sapiens
MWGNQMMVSWAKVVIMKMERKDEIESYLGDSVATASGPLLVEVAKTPGASLGVALTTSMCCNKQVIVIDKIKSASIADRCGALHVGDHILSIDGTSMEYCTLAEATQFLANTTDQVKLEILPHHQTRLALKGPDHVKIQRSDRQLTWDSWASNHSSLHTNHHYNTYHPDHCRVPALTFPKAPPPNSPPALVSSSFSPTSMSAYSLSSLNMGTLPRSLYSTSPRGTMMRRRLKKKDFKSSLSLASSTVGLAGQVVHTETTEVVLTADPVTGFGIQLQGSVFATETLSSPPLISYIEADSPAERCGVLQIGDRVMAINGIPTEDSTFEEASQLLRDSSITSKVTLEIEFDVAESVIPSSGTFHVKLPKKHNVELGITISSPSSRKPGDPLVISDIKKGSVAHRTGTLELGDKLLAIDNIRLDNCSMEDAVQILQQCEDLVKLKIRKDEDNSDEQESSGAIIYTVELKRYGGPLGITISGTEEPFDPIIISSLTKGGLAERTGAIHIGDRILAINSSSLKGKPLSEAIHLLQMAGETVTLKIKKQTDAQSASSPKKFPISSHLSDLGDVEEDSSPAQKPGKLSDMYPSTVPSVDSAVDSWDGSAIDTSYGTEGTSFQASGYNFNTYDWRSPKQRGSLSPVTKPRSQTYPDVGLSYEDWDRSTASGFAGAADSAETEQEENFWSQALEDLETCGQSGILRELEATIMSGSTMSLNHEAPTPRSQLGRQASFQERSSSRPHYSQTTRSNTLPSDVGRKSVTLRKMKQEIKEIMSPTPVELHKVTLYKDSDMEDFGFSVADGLLEKGVYVKNIRPAGPGDLGGLKPYDRLLQVNHVRTRDFDCCLVVPLIAESGNKLDLVISRNPLASQKSIDQQSLPGDWSEQNSAFFQQPSHGGNLETREPTNTL

SEQ ID NO: 370 - protein, 1697 aa, Homo sapiens
MCTALSQGISPCSTLTSSTASPSTDSPCSTLNSCVSKTAANKSPCETISSPSSTLESKDSGIIATITSSSENDDRSGSSLEWNKDGSLRLGVQKGVLHDRRADNCSPVAEEETTGSAESTLPKAESSAGDGPVPYSQGSSSLIMPRPNSVAATSSTKLEDLSYLDGQRNAPLRTSIRLPWHNTAGGRAQEVKARFAPYKPQDILLKPLLFEVPSITTDSVFVGRDWLFHQIEENLRNTELAENRGAVVVGNVGFGKTAIISKLVALSCHGSRMRQIASNSPGSSPKTSDPTQDLHFTPLLSPSSSTSASSTAKTPLGSISAENQRPREDAVKYLASKVVAYHYCQADNTYTCLVPEFVHSIAALLCRSHQLAAYRDLLIKEPQLQSMLSLRSCVQDPVAAFKRGVLEPLTNLRNEQKIPEEEYIILIDGLNEAEFHKPDYGDTLSSFITKIISKFPAWLKLIVTVRANFQEIISALPFVKLSLDDFPDNKDIHSDLHAYVQHRVHSSQDILSNISLNGKADATLIGKVSSHLVLRSLGSYLYLKLTLDLFQRGHLVIKSASYKVVPVSLSELYLLQCNMKFMTQSAFERALPILNVALASLHPMTDEQIFQAINAGHIQGEQGWEDFQQRMDALSCFLIKRRDKTRMFCHPSFREWLVWRADGENTAFLCEPRNGHALLAFMFSRQEGKLNRQQTMELGHHILKAHIFKGLSKKTGISSSHLQALWIGYSTEGLSAALASLRNLYTPNVKVSRLLILGGANVNYRTEVLNNAPILCVQSHLGHEEVVTLLLEFGACLDGTSENGMTALCYAAAAGHMKLVCLLTKKGVRVDHLDKKGQCALVHSALRGHGDILQYLLTCEWSPGPPQPGTLRKSHALQQALTAAASMGHSSVVQCLLGMEKEHEVEVNGTDTLWGETALTAAAGRGKLEVCELLLGHGAAVSRTNRRGVPPLFCAARQGHWQIVRLLLERGCDVNLSDKQGRTPLMVAACEGHLSTVEFLLSKGAALSSLDKEGLSALSWACLKGHRAVVQYLVEEGAAIDQTDKNGRTPLDLAAFYGDAETVLYLVEKGAVIEHVDHSGMRPLDRAIGCRNTSVVVALLRKGAKLGNAAWAMATSKPDILIILLQKLMEEGNVMYKKGKMKEAAQRYQYALRKFPREGFGEDMRPFNELRVSLYLNLSRCRRKTNDFGMAEEFASKALELKPKSYEAFYARARAKRNSRQFVAALADLQEAVKLCPTNQEVKRLLARVEEECKQLQRSQQQKQQGPLPAPLNDSENEEDTPTPGLSDHFHSEETEEEETSPQEESVSPTPRSQPSSSVPSSYIRNLQEGLQSKGRPVSPQSRAGIGKSLREPVAQPGLLLQPSKQAQIVKTSQHLGSGQSAVRNGSMKVQISSQNPPPSPMPGRIAAAPAGSRTQHLEGTGTFTTRAGCGHFGDRLGPSQNVRLQCGENGPAHPLPSKTKTTERLLSHSSVAVDAAPPNQGGLATCSDVRHPASLTSSGSSGSPSSSIKMSSSTSSLTSSSSFSDGFKVQGPDTRIKDKVVTHVQSGTAEHRPRNTPFMGIMDKTARFQQQSNPPSRSWHCPAPEGLLTNTSSAAGLQSANTEKPSLMQVGGYNNQAKTCSVSTLSASVHNGAQVKELEESKCQIPVHSQENRITKTVSHLYQESISKQQPHISNEAHRSHLTAAKPKRSFIESNV

SEQ ID NO: 371 - protein, 204 aa, Homo sapiens
MASVSSATFSGHGARSLLQFLRLVGQLKRVPRTGWVYRNVQRPESVSDHMYRMAVMAMVIKDDRLNKDRCVRLALVHDMAECIVGDIAPADNIPKEEKHRREEEAMKQITQLLPEDLRKELYELWEEYETQSSAEAKFVKQLDQCEMILQASEYEDLEHKPGRLQDFYDSTAGKFNHPEIVQLVSELEAERSTNIAAAASEPHS

SEQ ID NO: 372 - protein, 1663 aa, Homo sapiens
MATDGASCEPDLSRAPEDAAGAAAEAAKKEFDVDTLSKSELRMLLSVMEGELEARDLVIEALRARRKEVFIQERYGRFNLNDPFLALQRDYEAGAGDKEKKPVCTNPLSILEAVMAHCKKMQERMSAQLAAAESRQKKLEMEKLQLQALEQEHKKLAARLEEERGKNKQVVLMLVKECKQLSGKVIEEAQKLEDVMAKLEEEKKKTNELEEELSAEKRRSTEMEAQMEKQLSEFDTEREQLRAKLNREEAHTTDLKEEIDKMRKMIEQLKRGSDSKPSLSLPRKTKDRRLVSISVGTEGTVTRSVACQTDLVTENADHMKKLPLTMPVKPSTGSPLVSANAKGSVCTSATMARPGIDRQASYGDLIGASVPAFPPPSANKIEENGPSTGSTPDPTSSTPPLPSNAAPPTAQTPGIAPQNSQAPPMHSLHSPCANTSLHPGLNPRIQAARFRFQGNANDPDQNGNTTQSPPSRDVSPTSRDNLVAKQLARNTVTQALSRFTSPQAGAPSRPGVPPTGDVGTHPPVGRTSLKTHGVARVDRGNPPPIPPKKPGLSQTPSPPHPQLKVIIDSSRASNTGAKVDNKTVASTPSSLPQGNRVINEENLPKSSSPQLPPKPSIDLTVAPAGCAVSALATSQVGAWPAATPGLNQPACSDSSLVIPTTIAFCSSINPVSASSCRPGASDSLLVTASGWSPSLTPLLMSGGPAPLAGRPTLLQQAAAQGNVTLLSMLLNEEGLDINYSCEDGHSALYSAAKNGHTDCVRLLLSAEAQVNAADKNGFTPLCAAAAQGHFECVELLISYDANINHAADGGQTPLYLACKNGNKECIKLLLEAGTNRSVKTTDGWTPVHAAVDTGNVDSLKLLMYHRIPAHGNSFNEEESESSVFDLDGGEESPEGISKPVVPADLINHANREGWTAAHIAASKGFKNCLEILCRHGGLEPERRDKCNRTVHDVATDDCKHLLENLNALKIPLRISVGEIEPSNYGSDDLECENTICALNIRKQTSWDDFSKAVSQALTNHFQAISSDGWWSLEDVTCNNTTDSNIGLSARSIRSITLGNVPWSVGQSFAQSPWDFMRKNKAEHITVLLSGPQEGCLSSVTYASMIPLQMMQNYLRLVEQYHNVIFHGPEGSLQDYIVHQLALCLKHRQMAAGFSCEIVRAEVDAGFSKEQLLDLFISSACLIPVKQSPSKKKIIIILENLEKSSLSELLRDFLAPLENRSTESPCTFQKGNGLSECYYFHENCFLMGTIAKACLQGSDLLVQQHFRWVQLRWDGEPMQGLLQRFLRRKVVNKFKGQAPSPCDPVCKIVDWALSVWRQLNSCLARLGTPEALLGPKYFLSCPVVPGHAQVTVKWMSKLWNGVIAPRVQEAILSRASVKRQPGFGQTTAKRHPSQGQQAVVKAALSILLNKAVLHGCPLPRAELDQHTADFKGGSFPLSIVSSYNTCNKKKGESGAWRKVNTSPRRKSGRFSLPTWNKPDLSTEGMKNKTISQLNCNRNASLSKQKSLENDLSLTLNLDQRLSLGSDDEADLVKELQSMCSSKSESDISKIADSRDDLRMFDSSGNNPVLSATINNLRMPVSQKEVSPLSSHQTTECSNSKSKTELGVSRVKSFLPVPRSKVTQCSQNTKRSSSSSNTRQIEINNNSKEVNWNLHKNEHLEKPNK

SEQ ID NO: 373 - protein, 842 aa, Homo sapiens
MDFQERDPPFLPESAQSSKPSSAQQASELWEVVEEPRVRLGTEGVMPERQEGHLLKKRKWPLKGWHKRYFVLEDGILHYATTRQDITKGKLHGSIDVRLSVMSINKKAQRIDLDTEDNIYHLKIKSQDLFQSWVAQLRAHRLAHRLDMPRGSLPSTAHRKVPGAQLPTAATASALPGLGPREKVSSWLRDSDGLDRCSHELSECQGKLQELHRLLQSLESLHRIPSAPVIPTHQASVTTERPKKGKRTSRMWCTQSFAKDDTIGRVGRLHGSVPNLSRYLESRDSSGTRGLPPTDYAHLQRSFWALAQKVHSSLSSVLAALTMERDQLRDMHQGSELSRMGVSEASTGQRRLHSLSTSSDTTADSFSSLNPEEQEALYMKGRELTPQLSQTSILSLADSHTEFFDACEVLLSASSSENEGSEEEESCTSEITTSLSEEMLDLRGAERCQKGGCVPGRPMGPPRRRCLPAASGPGADVSLWNILRNNIGKDLSKVSMPVQLNEPLNTLQRLCEELEYSSLLDQASRIADPCERMVYIAAFAVSAYSSTYHRAGCKPFNPVLGETYECERPDRGFRFISEQVSHHPPISACHAESENFAFWQDMKWKNKFWGKSLEIVPVGTVNVSLPRFGDHFEWNKVTSCIHNVLSGQRWIEHYGEVLIRNTQDSSCHCKITFCKAKYWSSNVHEVQGAVLSRSGRVLHRLFGKWHEGLYRGPTPGGQCIWKPNSMPPDHERNFGFTQFALELNELTAELKRSLPSTDTRLRPDQRYLEEGNIQAAEAQKRRIEQLQRDRRKVMEENNIVHQARFFRRQTDSSGKEWWVTNNTYWRLRAEPGYGNMDGAVLW

SEQ ID NO: 374 - protein, 1883 aa, Homo sapiens
MPVGRIECPSSPSFPRDISHECRVCGVTEVGLSAYAKHISGQLHKDNVDAQEREDDGKGEEEEEDYFDKELIQLIKQRKEQSRQDEPSNSNQEINSDDRRPQWRREDRIPYQDRESYSQPAWHHRGPPQRDWKWEKDGFNNTRKNSFPHSLRNGGGPRGRSGWHKGVAGGSSTWFHNHSNSGGGWLSNSGAVDWNHNGTGRNSSWLSEGTGGFSSWHMNNSNGNWKSSVRSTNNWNYSGPGDKFQPGRNRNSNCQMEDMTMLWNKKSNKSNKYSHDRYNWQRQENDKLGTVATYRGPSEGFTSDKFPSEGLLDFNFEQLESQTTKQADTATSKVSGKNGSAAREKPRRWTPYPSQKTLDLQSGLKDITGNKSEMIEKPLFDFSLITTGIQEPQTDETRNSPTQKTQKKIHTGSLNHKASSDSAASFEVVRQCPTAEKPEQEHTPNKMPSLKSPLLPCPATKSLSQKQDPKNISKNTKTNFFSPGEHSNPSNKPTVEDNHGPYISKLRSSCPHVLKGNKSTFGSQKQSGDNLNDTLRKAKEVLQCHESLQNPLLSTSKSTRNYAKASRNVEESEKGSLKIEFQVHALEDESDGETSDTEKHGTKIGTLGSATTELLSGSTRTADEKEEDDRILKTSRELSTSPCNPIVRQKESELQMTSAASPHPGLLLDLKTSLEDAQVDDSIKSHVSYETEGFESASLDAELQKSDISQPSGPLLPELSKLGFPASLQRDLTRHISLKSKTGVHLPEPNLNSARRIRNISGHRKSETEKESGLKPTLRQILNASRRNVNWEQVIQQVTKKKQELGKGLPRFGIEMVPLVQNEQEALDLDGEPDLSSLEGFQWEGVSISSSPGLARKRSLSESSVIMDRAPSVYSFFSEEGTGKENEPQQMVSPSNSLRAGQSQKATMHLKQEVTPRAASLRTGERAENVATQRRHSAQLSSDHIIPLMHLAKDLNSQERSIPPSENQNSQESNGEGNCLSSSASSALAISSLADAATDSSCTSGAEQNDGQSIRKKRRATGDGSSPELPSLERKNKRRKIKKKKERSQVDQLLNISLREEELSKSLQCMDNNLLQARAALQTAYVEVQRLLMLKQQITMEMSALRTHRIQILQGLQETYEPSEHPDQVPCSLTRERRNSRSQTSIDAALLPTPFFPLFLEPPSSHVSPSPTGASLQITTSPTFQTHGSVPAPDSSVQIKQEPMSPEQDENVNAVPPSSACNVSKELLEANREISDSCPVYPVITARLSLPESTESFHEPSQELKFSVEQRNTRNRENSPSSQSAGLSSINKEGEEPTKGNSGSEACTSSFLRLSFASETPLEKEPHSPADQPEQQAESTLTSAETRGSKKKKKLRKKKSLRAAHVPENSDTEQDVLTVKPVRKVKAGKLIKGGKVTTSTWEDSRTGREQESVRDEPDSDSSLEVLEIPNPQLEVVAIDSSESGEEKPDSPSKKDIWNSTEQNPLETSRSGCDEVSSTSEIGTRYKDGIPVSVAETQTVISSIKGSKNSSEISSEPGDDDEPTEGSFEGHQAAVNAIQIFGNLLYTCSADKTVRVYNLVSRKCIGVFEGHTSKVNCLLVTQTSGKNAALYTGSSDHTIRCYNVKSRECVEQLQLEDRVLCLHSRWRILYAGLANGTVVTFNIKNNKRLEIFECHGPRAVSCLATAQEGARKLLVVGSYDCTISVRDARNGLLLRTLEGHSKTILCMKVVNDLVFSGSSDQSVHAHNIHTGELVRIYKGHNHAVTVVNILGKVMVTACLDKFVRVYELQSHDRLQVYGGHKDMIMCMTIHKSMIYTGCYDGSIQAVRLNLMQNYRCWWHGCSLIFGVVDHLKQHLLTDHTNPNFQTLKCRWKNCDAFFTARKGSKQDAAGHIERHAEDDSKIDS

SEQ ID NO: 375 - protein, 230 aa, Homo sapiens
MAYCPIQCEKLCYLPGNSKCSSVYENCLEQSRAIGNVHPRGVQSQRDTSLLKHTCRVDLFDDPCYINTQALQSTPGSAGNQRSAQPLGSPWHCGKAPETVQPGATAQPASSHSLPHIKQQLWSEECYHGKLSRKAAESLLVKDGDFLVRESATSPGQYVLSGLQGGQAKHLLLVDPEGKVRTKDHVFDNVGHLIRYHMDNSLPIISSGSEVSLKQPVRKDNNPALLHSNK

SEQ ID NO: 376 - protein, 226 aa, Homo sapiens [sequence omitted]

SEQ ID NO: 377 - protein, 437 aa, Homo sapiens
MAALRALCGFRGVAAQVLRPGAGVRLPIQPSRGVRQWQPDVEWAQQFGGAVMYPSKETAHWKPPPWNDVDPPKDTIVKNITLNFGPQHPAAHGVLRLVMELSGEMVRKCDPHIGLLHRGTEKLIEYKTYLQALPYFDRLDYVSMMCNEQAYSLAVEKLLNIRPPPRAQWIRVLFGEITRLLNHIMAVTTHALDLGAMTPFFWLFEEREKMFEFYERVSGARMHAAYIRPGGVHQLLTNNRIWRNRTIDIGVVTAEEALNYGFSGVMLRGSGIQWDLRKTQPYDVYDQVEFDVPVGSRGDCYDRYLCRVEEMRQSLRIIAQCLNKMPPGEIKVDDAKVSPPKRAEMKTSMESLIHHFKLYTEGYQVPPGATYTAIEAPKGEFGVYLVSDGSSRPYRCKIKAPGFAHLAGLDKMSKGHMLADVVAIIGTQDIVFGEVDR

SEQ ID NO: 378 - protein, 150 aa, Homo sapiens
MLQHIVLACCWPRRLLNRFGMDKIYEGQVEVTGDEYNVESIDGQPEVHRKHIMGQNVADYMRYLMEEDEDAYKKQFSQYIKNSVTPDMMEEMYKKAHAAIRENPVYEKKPKKEVKKKRWNRPKMSLAQKKDRVAQKKASFLRAQERAAES

SEQ ID NO: 379 - protein, 319 aa, Homo sapiens
MGIWQRLLLFGGVSLRAGGGATAPLGGSRAMVCGRQLSGAGSETLKQRRTQIMSRGLPKQKPIEGVKQVIVVASGKGGVGKSTTAVNLALALAANDSSKAIGLLDVDVYGPSVPKMMNLKGNPELSQSNLMRPLLNYGIACMSMGFLVEESEPVVWRGLMVMSAIEKLLRQVDWGQLDYLVVDMPPGTGDVQLSVSQNIPITGAVIVSTPQDIALMDAHKGAEMFRRVHVPVLGLVQNMSVFQCPKCKHKTHIFGADGARKLAQTLGLEVLGDIPLHLNIREASDTGQPIVFSQPESDEAKAYLRIAVEVVRRLPSPSE

SEQ ID NO: 380 - protein, 129 aa, Homo sapiens
MASHRLLLLCLAGLVFVSEAGPTGTGESKCPLMVKVLDAVRGSPAINVAVHVFRKAADDTWEPFASGEGIYKVEIDTKSYWKALGISPFHEHAEVVFTANDSGPRRYTIAALLSPYSYSTTAVVTNPKE

SEQ ID NO: 381 - protein, 242 aa, Homo sapiens
MLLGRLTSQLLRAVPWAGGRPPWPVSGVLGSRVCGPLYSTSPAGPGRAASLPRKGAQLELEEMLVPRKMSVSPLESWLTARCFLPRLDTGTAGTVAPPQSYQCPPSQIGEGAEQGDEGVADAPQIQCKNVLKIRRRKMNHHKYRKLVKKTRFLRRKVQEGRLRRKQIKFEKDLRRIWLKAGLKEAPEGWQTPKIYLRGQMSLAPPFPPVAAVIRSNKCSEDCKREDNLVLILGLRPIPIGVV

SEQ ID NO: 382 - protein, 210 aa, Homo sapiens
MLLGRLTSQLLRAVPWASLPRKGAQLELEEMLVPRKMSVSPLESWLTARCFLPRLDTGTAGTVAPPQSYQCPPSQIGEGAEQGDEGVADAPQIQCKNVLKIRRRKMNHHKYRKLVKKTRFLRRKVQEGRLRRKQIKFEKDLRRIWLKAGLKEAPEGWQTPKIYLRGQMSLAPPFPPVAAVIRSNKCSEDCKREDNLVLILGLRPIPIGVV

SEQ ID NO: 383 - protein, 185 aa, Homo sapiens
MLLGRLTSQLLRAVPWAGGRPPWPVSGVLGSRVCGPLYSTSPAGPGRAASLPRKGAQLELEEMLVPRKMSVSPLESWLTARCFLPRLDTGTAGTVAPPQSYQCPPSQIGEGAEQGDEGIWLKAGLKEAPEGWQTPKIYLRGQMSLAPPFPPVAAVIRSNKCSEDCKREDNLVLILGLRPIPIGVV

SEQ ID NO: 384 - protein, 398 aa, Homo sapiens
MPPSGPRGTLLLLPLLLLLLLRAVLAVPLERGAPNKEETPATESPDTGLYYHRYLQEVIDVLETDGHFREKLQAANAEDIKSGKLSRELDFVSHHVRTKLDELKRQEFEHLDPQNQHTFEARDLELLIQTATRDLAQYDAAHHEEFKRYEMLKEHERRRYLESLGEEQRKEAERKLEEQQRRHREHPKVNVPGSQAQLKEELEALFTKELEKVYDPKNEEDDMREMEEERLRMREHVMKNVDTNQDRLVTLEEFLASTQRKEFGDTGEGWETVEMHPAYTEEELRRFEEELAAREAELNAKAQRLSQETEALGRSQGRLEAQKRELQQAVLHMEQRKQQQQQQQGHKAPAAHPEGQLKFHPDTDDVPVPAPAGDQKEVDTSEKKLLERLPEVEVPQHL

SEQ ID NO: 385 - protein, 241 aa, Homo sapiens [sequence omitted]

SEQ ID NO: 386 - protein, 212 aa, Homo sapiens [sequence omitted]

SEQ ID NO: 387 - protein, 563 aa, Homo sapiens
MWAVLRLALRPCARASPAGPRAYHGDSVASLGTQPDLGSALYQENYKQMKALVNQLHERVEHIKLGGGEKARALHISRGKLLPRERIDNLIDPGSPFLELSQFAGYQLYDNEEVPGGGIITGIGRVSGVECMIIANDATVKGGAYYPVTVKKQLRAQEIAMQNRLPCIYLVDSGGAYLPRQADVFPDRDHFGRTFYNQAIMSSKNIAQIAVVMGSCTAGGAYVPAMADENIIVRKQGTIFLAGPPLVKAATGEEVSAEDLGGADLHCRKSGVSDHWALDDHHALHLTRKVVRNLNYQKKLDVTIEPSEEPLFPADELYGIVGANLKRSFDVREVIARIVDGSRFTEFKAFYGDTLVTGFARIFGYPVGIVGNNGVLFSESAKKGTHFVQLCCQRNIPLLFLQNITGFMVGREYEAEGIAKDGAKMVAAVACAQVPKITLIIGGSYGAGNYGMCGRAYSPRFLYIWPNARISVMGGEQAANVLATITKDQRAREGKQFSSADEAALKEPIIKKFEEEGNPYYSSARVWDDGIIDPADTRLVLGLSFSAALNAPIEKTDFGIFRM

SEQ ID NO: 388 - protein, 59 aa, Homo sapiens
MPKGKAFRRTLRITSLFFSSLLLLQLLFGHHLLVLVSPQLPGAVFEGEAFSVLLLRPFR

SEQ ID NO: 389 - protein, 49 aa, Homo sapiens
MFLFGRLFQIITVVTCLQFIQDCCVRSGQMNSLLETSSLSRCLEVPNVC

SEQ ID NO: 390 - protein, 350 aa, Homo sapiens
MAATSLMSALAARLLQPAHSCSLRLRPFHLAAVRNEAVVISGRKLAQQIKQEVRQEVEEWVASGNKRPHLSVILVGENPASHSYVLNKTRAAAVVGINSETIMKPASISEEELLNLINKLNNDDNVDGLLVQLPLPEHIDERRICNAVSPDKDVDGFHVINVGRMCLDQYSMLPATPWGVWEIIKRTGIPTLGKNVVVAGRSKNVGMPIAMLLHTDGAHERPGGDATVTISHRYTPKEQLKKHTILADIVISAAGIPNLITADMIKEGAAVIDVGINRVHDPVTAKPKLVGDVDFEGVRQKAGYITPVPGGVGPMTVAMLMKNTIIAAKKVLRLEEREVLKSKELGVATN

SEQ ID NO: 391 - protein, 199 aa, Homo sapiens
MAWPCISRLCCLARRWNQLDRSDVAVPLTLHGYSDLDSEEPGTGGAASRRGQPPAGARDSGRDVPLTQYQRDFGLWTTPAGPKDPPPGRGPGAGGRRGKSSAQSSAPPAPGARGVYVLPIGDADAAAAVTTSYRQEFQAWTGVKPSRSTKTKPARVITTHTSGWDSSPGAGFQVPEVRKKFTPNPSAIFQASAPRILNV

SEQ ID NO: 392 - protein, 310 aa, Homo sapiens
MAPARRPAGARLLLVYAGLLAAAAAGLGSPEPGAPSRSRARREPPPGNELPRGPGESRAGPAARPPEPSEANRPAGLAVFQEPTAERAHSVDPRDAWMLFVRQSDKGVNGKKRSRGKAKKLKGPPGPIIPPEALLKEFQLLLKGAVRQRERAEPEPCTCGPAGPVAASLAPVSATAGEDDDDVPDAEGAFRRGPGLNLTSGQYRAPVAGFYALAATLHVALGEPPRRGPPRPRDHLRLLICIQSRCQRNASLEAIMGLESSSELFTISVNGVLYLQMGQWTSWACERPPQALPLRGKWSTDLDNVWTVSE

SEQ ID NO: 393 - protein, 517 aa, Homo sapiens
MAALRLLASVLGRGVPAGGSGLALSQGCARCFATSPRLRAKFYADPVEMVKDISDGATVMIGGFGLCGIPENLIAALLRTRVKDLQVVSSNVGVEDFGLGLLLAARQVRRIVCSYVGENTLCESQYLAGELELELTPQGTLAERIRAGGAGVPAFYTPTGYGTLVQEGGAPIRYTPDGHLALMSQPREVREFNGDHFLLERAIRADFALVKGWKADRAGNVVFRRSARNFNVPMCKAADVTAVEVEEIVEVGAFPPEDIHVPNIYVDRVIKGQKYEKRIERLTILKEEDGDAGKEEDARTRIIRRAALEFEDGMYANLGIGIPLLASNFISPSMTVHLHSENGILGLGPFPTEDEVDADLINAGKQTVTVLPGGCFFASDDSFAMIRGGHIQLTMLGAMQVSKYGDLANWMIPGKKVKGMGGAMDLVSSQKTRVVVTMQHCTKDNTPKIMEKCTMPLTGKRCVDRIITEKAVFDVHRKKELTLRELWEGLTVDDIKKSTGCAFAVSPNLRPMQQVAP

SEQ ID NO: 394 - protein, 171 aa, Homo sapiens
MEPGPALAWLLLLSLLADCLKAAQSRDFTVKDIIYLHPSTTPYPGGFKCFTCEKAADNYECNRWAPDIYCPRETRYCYTQHTMEVTGNSISVTKRCVPLEECLSTGCRDSEHEGHKVCTSCCEGNICNLPLPRNETDATFATTSPINQTNGHPRCMSVIVSCLWLWLGLML

SEQ ID NO: 395 - protein, 288 aa, Homo sapiens
MCFRTKLSVSWVPLFLLLSRVFSTETDKPSAQDSRSRGSSGQPADLLQVLSAGDHPPHNHSRSLIKTLLEKTGCPRRRNGMQGDCNLVSEIEWGQCFEPDALLLIAGGNFEDQLREEVVQRVSLLLLYYIIHQEEICSSKLNMSNKEYKFYLHSLLSLRQDEDSSFLSQNETEDILAFTRQYFDTSQSQCMETKTLQKKSGIVSSEGANESTLPQLAAMIITLSLQGVCLGQGNLPSPDYFTEYIFSSLNRTNTLRLSELDQLLNTLWTRSTCIKMRKSINFKGNKTT

SEQ ID NO: 396 - protein, 169 aa, Homo sapiens
MELLVMPTLGFSPTCMQLLLNFRGCDLNYRASEFMKLNCGGILKTKFKYNNICLFLESFMTSREMVPERKNQEKESDDASTVNEETSEENNEMEESDVSQAEKDLLHSEGSENEGPESSGSSDCRETEELVGSNSSKTGEILSESSMENDDEATEVTDEPLEQEGGVKN

SEQ ID NO: 397 - protein, 340 aa, Homo sapiens
MPGWLTLPTLCRFLLWAFTIFHKAQGDPASHPGPHYLLPPIHEVIHSHRGATATLPCVLGTTPPSYKVRWSKVEPGELRETLILITNGLHARGYGPLGGRARMRRGHRLDASLVIAGVRLEDEGRYRCELINGIEDESVALTLSLEGVVFPYQPSRGRYQFNYYEAKQACEEQDGRLATYSQLYQAWTEGLDWCNAGWLLEGSVRYPVLTARAPCGGRGRPGIRSYGPRDRMRDRYDAFCFTSALAGQVFFVPGRLTLSEAHAACRRRGAVVAKVGHLYAAWKFSGLDQCDGGWLADGSVRFPITTPRPRCGGLPDPGVRSFGFPRPQQAAYGTYCYAEN

SEQ ID NO: 398 - protein, 169 aa, Homo sapiens
MLPSTMFLVHLPLSTNRLHCLRNTSLESYLCSFVHLNHPLHISDRVILISLHEAVRFSFAFSFPRGTLSIAYCLMSSVSTSSEAIMSTELLANYCHSSLHVCICISSFPNETGNHDSFPGAVVSISDQPTDQCKLAAKELPLRNLLECRFFDCMGEEDLINLGVIGTER

SEQ ID NO: 399 - protein, 766 aa, Homo sapiens
MIWRSRAGAELFSLMALWEWIALSLHCWVLAVAAVSDQHATSPFDWLLSDKGPFHRSQEYTDFVDRSRQGFSTRYKIYREFGRWKVNNLAVERRNFLGSPLPLAPEFFRNIRLLGRRPTLQQITENLIKKYGTHFLLSATLGGEESLTIFVDKRKLSKRAEGSDSTTNSSSVTLETLHQLAASYFIDRDSTLRRLHHIQIASTAIKVTETRTGPLGCSNYDNLDSVSSVLVQSPENKIQLQGLQVLLPDYLQERFVQAALSYIACNSEGEFICKENDCWCHCGPKFPECNCPSMDIQAMEENLLRITETWKAYNSDFEESDEFKLFMKRLPMNYFLNTSTIMHLWTMDSNFQRRYEQLENSMKQLFLKAQKIVHKLFSLSKRCHKQPLISLPRQRTSTYWLTRIQSFLYCNENGLLGSFSEETHSCTCPNDQVVCTAFLPCTVGDASACLTCAPDNRTRCGTCNTGYMLSQGLCKPEVAESTDHYIGFETDLQDLEMKYLLQKTDRRIEVHAIFISNDMRLNSWFDPSWRKRMLLTLKSNKYKSSLVHMILGLSLQICLTKNSTLEPVLAVYVNPFGGSHSESWFMPVNENSFPDWERTKLDLPLQCYNWTLTLGNKWKTFFETVHIYLRSRIKSNGPNGNESIYYEPLEFIDPSRNLGYMKINNIQVFGYSMHFDPEAIRDLILQLDYPYTQGSQDSALLQLLEIRDRVNKLSPPGQRRLDLFSCLLRHRLKLSTSEVVRIQSALQAFNAKLPNTMDYDTTKLCS

SEQ ID NO: 400 - protein, 69 aa, Homo sapiens
MNFCKKPRRCHALLLPPWAGLEVGMPPSHTQLGMHPGPPPPPSGSEGPGTPPTDNGRTDAAGAQEELVP

SEQ ID NO: 401 - protein, 458 aa, Homo sapiens
MQATSNLLNLLLLSLFAGLDPSKTQISPKEGWQVYSSAQDPDGRCICTVVAPEQNLCSRDAKSRQLRQLLEKVQNMSQSIEVLNLRTQRDFQYVLKMETQMKGLKAKFRQIEDDRKTLMTKHFQELKEKMDELLPLIPVLEQYKTDAKLITQFKEEIRNLSAVLTGIQEEIGAYDYEELHQRVLSLETRLRDCMKKLTCGKLMKITGPVTVKTSGTRFGAWMTDPLASEKNNRVWYMDSYTNNKIVREYKSIADFVSGAESRTYNLPFKWAGTNHVVYNGSLYFNKYQSNIIIKYSFDMGRVLAQRSLEYAGFHNVYPYTWGGFSDIDLMADEIGLWAVYATNQNAGNIVISQLNQDTLEVMKSWSTGYPKRSAGESFMICGTLYVTNSHLTGAKVYYSYSTKTSTYEYTDIPFHNQYFHISMLDYNARDRALYAWNNGHQVLFNVTLFHIIKTEDDT

SEQ ID NO: 402 - protein, 488 aa, Homo sapiens
MSPPLLKLGAVLSTMAMISNWMSQTLPSLVGLNTTRLSNLLLLSLFAGLDPSKTQISPKEGWQVYSSAQDPDGRCICTVVAPEQNLCSRDAKSRQLRQLLEKVQNMSQSIEVLNLRTQRDFQYVLKMETQMKGLKAKFRQIEDDRKTLMTKHFQELKEKMDELLPLIPVLEQYKTDAKLITQFKEEIRNLSAVLTGIQEEIGAYDYEELHQRVLSLETRLRDCMKKLTCGKLMKITGPVTVKTSGTRFGAWMTDPLASEKNNRVWYMDSYTNNKIVREYKSIADFVSGAESRTYNLPFKWAGTNHVVYNGSLYFNKYQSNIIIKYSFDMGRVLAQRSLEYAGFHNVYPYTWGGFSDIDLMADEIGLWAVYATNQNAGNIVISQLNQDTLEVMKSWSTGYPKRSAGESFMICGTLYVTNSHLTGAKVYYSYSTKTSTYEYTDIPFHNQYFHISMLDYNARDRALYAWNNGHQVLFNVTLFHIIKTEDDT

SEQ ID NO: 403 - protein, 273 aa, Homo sapiens
MTSQRSPLAPLLLLSLHGVAASLEVSESPGSIQVARGQPAVLPCTFTTSAALINLNVIWMVTPLSNANQPEQVILYQGGQMFDGAPRFHGRVGFTGTMPATNVSIFINNTQLSDTGTYQCLVNNLPDIGGRNIGVTGLTVLVPPFAPHCQIQGSQDIGSDVILLCSSEEGIPRPTYLWEKLDNTLKLPPTATQDQVQGTVTIRNISALSSGLYQCVASNAIGTSTCLLDLQVISRAFFYWRSKNKEEEEEEIPNEISFIHWIMKEGKVQHVPN

SEQ ID NO: 404 - protein, 596 aa, Homo sapiens
MQGPPLLTAAHLLCVCTAALAVAPGPRFLVTAPGIIRPGGNVTIGVELLEHCPSQVTVKAELLKTASNLTVSVLEAEGVFEKSSFKTLTLPSLPLNSADEIYELRVTGRTQDEILFSNSTRLSFETKRISVFIQTDKALYKQKQEVKFRIVTLFSDFKPYKTSLNILIKDPKSNLIQQWLSQQSDLGVISKTFQLSSHPILGDWSIQVQVNDQTYYQSFQVSEYVLPKFEVTLQTPLYCSMNSKHLNGTITAKYTYGKPVKGDVTLTFLPLSFWGKKKNITKTFKINGSANFSFNDEEMKNVMDSSNGLSEYLDLSSPGPVEILTTVTESVTGISRNVSTNVFFKQHDYIIEFFDYTTVLKPSLNFTATVKVTRADGNQLTLEERRNNVVITVTQRNYTEYWSGSNSGNQKMEAVQKINYTVPQSGTFKIEFPILEDSSELQLKAYFLGSKSSMAVHSLFKSPSKTYIQLKTRDENIKVVSRGQLVAVGKQNSTMFSLTPENSWTPKACVIVYYIEDDGEIISDVLKIPVQLVFKNKIKLYWSKVKAEPSEKVSLRISVTQPDSIVGIVAVDKSVNLMNASNDITMENVSLAIFSL

SEQ ID NO: 405 - protein, 628 aa, Homo sapiens
MIVTGGLAWWNDFMVLACYNINDRQEELRVYLRTSNLDNAFAHVTKAQAETLLLSVFQDMVIVFRADCSICLYSIERKSDGPNTTAGIQVLQEVSMSRYIPHPFLVVSVTLTSVSTENGITLKMPQQARGAESIMLNLAGQLIMMQRDRSGPQIREKDSNPNNQRKLLPFCPPVVLAQSVENVWTTCRANKQKRHLLEALWLSCGGAGMKVWLPLFPRDHRKPHSFLSQRIMLPFHINIYPLAVLFEDALVLGAVNDTLLYDSLYTRNNAREQLEVLFPFCVVERTSQIYLHHILRQLLVRNLGEQALLLAQSCATLPYFPHVLELMLHEVLEEEATSREPIPDPLLPTVAKFITEFPLFLQTVVHCARKTEYALWNYLFAAVGNPKDLFEECLMAQDLDTAASYLIILQNMEVPAVSRQHATLLFNTALEQGKWDLCRHMIRFLKAIGSGESETPPSTPTAQEPSSSGGFEFFRNRSISLSQSAENVPASKFSLQKTLSMPSGPSGKRWSKDSDCAENMYIDMMLWRHARRLLEDVRLKDLGCFAAQLGFELISWLCKERTRAARVDNFVIALKRLHKDFLWPLPIIPASSISSPFKNGKYRTGNVDFMSLVQGELYFTPCIYTFCY

SEQ ID NO: 406 - protein, 265 aa, Homo sapiens
MRLLGAAAVAALGRGRAPASLGWQRKQVNWKACRWSSSGVIPNEKIRNIGISAHIDSGKTTLTERVLYYTGRIAKMHEVKGKDGVGAVMDSMELERQRGITIQSAATYTMWKDVNINIIDTPGHVDFTIEVERALRVLDGAVLVLCAVGGVQCQTMTVNRQMKRYNVPFLTFINKLDRMGSNPARALQQMRSKLNHNAAFMQIPMGLEGNFKGIVDLIEERAIYFDGDFGQIVRYGEIPAELRAAATDHRQELIECVANSDEQLG

SEQ ID NO: 407 - protein, 282 aa, Homo sapiens
MPVPWFLLSLALGRSPVVLSLERLVGPQDATHCSPGLSCRLWDSDILCLPGDIVPAPGPVLAPTHLQTELVLRCQKETDCDLCLRVAVHLAVHGHWEEPEDEEKFGGAADLGVEEPRNASLQAQVVLSFQAYPTARCVLLEVQVPAALVQFGQSVGSVVYDCFEAALGSEVRIWSYTQPRYEKELNHTQQLPDCRGLEVWNSIPSCWALPWLNVSADGDNVHLVLNVSEEQHFGLSLYWNQVQGPPKPRWHKNLVRPPPSQVHSHCRPMPVQRTQCHIREDP

SEQ ID NO: 408 - protein, 221 aa, Homo sapiens
MGTLVAKLLLPTLSSLAFLPTVSIAAKRRFHMEAMVYLFTLFFVALHHACNGPGLSVLCFMRHDILEYFSVYGTALSMWVSLMALADFDEPKRSTFVMFGVLTIAVRIYHDRWGYGVYSGPIGTAILIIAAKWLQKMKEKKGLYPDKSVYTQQIGPGLCFGALALMLRFFFEDWDYTYVHSFYHCALAMSFVLLLPKVNKKAGSPGTPAKLDCSTLCCACV

SEQ ID NO: 409 - protein, 524 aa, Homo sapiens
MPQLSLSWLGLGPVAASPWLLLLLVGGSWLLARVLAWTYTFYDNCRRLQCFPQPPKQNWFWGHQGLVTPTEEGMKTLTQLVTTYPQGFKLWLGPTFPLLILCHPDIIRPITSASAAVAPKDMIFYGFLKPWLGDGLLLSGGDKWSRHRRMLTPAFHFNILKPYMKIFNKSVNIMHDKWQRLASEGSARLDMFEHISLMTLDSLQKCVFSFESNCQEKPSEYIAAILELSAFVEKRNQQILLHTDFLYYLTPDGQRFRRACHLVHDFTDAVIQERRCTLPTQGIDDFLKNKAKSKTLDFIDVLLLSKDEDGKELSDEDIRAEADTFMFEGHDTTASGLSWVLYHLAKHPEYQEQCRQEVQELLKDREPIEIEWDDLAQLPFLTMCIKESLRLHPPVPVISRCCTQDFVLPDGRVIPKGIVCLINIIGIHYNPTVWPDPEVYDPFRFNQENIKERSPLAFIPFSAGPRNCIGQAFAMAEMKVVLALTLLHFRILPTHTEPRRKPELILRAEGGLWLRVEPLGANSQ

SEQ ID NO: 410 - protein, 288 aa, Homo sapiens
MRIWWLLLAIEICTGNINSQDTCRQGHPGIPGNPGHNGLPGRDGRDGAKGDKGDAGEPGRPGSPGKDGTSGEKGERGADGKVEAKGIKGDQGSRGSPGKHGPKGLAGPMGEKGLRGETGPQGQKGNKGDVGPTGPEGPRGNIGPLGPTGLPGPMGPIGKPGPKGEAGPTGPQDMPIKFDKILYNEFNHYDTAAGKFTCHIAGVYYFTYHITVFSRNVQVSLVKNGVKILHTKDAYMSSEDQASGGIVLQLKLGDEVWLQVTGGERFNGLFADEDDDTTFTGFLLFSSP

SEQ ID NO: 411 - protein, 300 aa, Homo sapiens [sequence omitted]

SEQ ID NO: 412 - protein, 333 aa, Homo sapiens
MRIWWLLLAIEICTGNINSQDTCRQGHPGIPGNPGHNGLPGRDGRDGAKGDKGDAGEPGRPGSPGKDGTSGEKGERGADGKVEAKGIKGDQGSRGSPGKHGPKGLAGPMGEKGLRGETGPQGQKGNKGDVGPTGPEGPRGNIGPLGPTGLPGPMGPIGKPGPKGEAGPTGPQGEPGVQGIRGWKGDRGEKGKIGETLVLPKSAFTVGLTVLSKFPSSDRPIKFDKILYNEFNHYDTAAGKFTCHIAGVYYFTYHITVFSRNVQVSLVKNGVKILHTKDAYMSSEDQASGGIVLQLKLGDEVWLQVTGGERFNGLFADEDDDTTFTGFLLFSSP

SEQ ID NO: 413 - protein, 306 aa, Homo sapiens
MRIWWLLLAIEICTGNINSQDTCRQGHPGIPGNPGHNGLPGRDGRDGAKGDKGDAGEPGRPGSPGKDGTSGEKGERGADGKVEAKGIKGDQGSRGSPGKHGPKGLAGPMGEKGLRGETGPQGQKGNKGDVGPTGPEGPRGNIGPLGPTGLPGPMGPIGKPGPKGEAGPTGPQGEPGVQGIRGWKGDRGEKGKIGETLVLPKSAFTVGLTVLSKFPSSDRPIKFDKIHITVFSRNVQVSLVKNGVKILHTKDAYMSSEDQASGGIVLQLKLGDEVWLQVTGGERFNGLFADEDDDTTFTGFLLFSSP

SEQ ID NO: 414 - protein, 398 aa, Homo sapiens
MMWLLLTTTCLICGTLNAGGFLDLENEVNPEVWMNTSEIIIYNGYPSEEYEVTTEDGYILLVNRIPYGRTHARSTGPRPVVYMQHALFADNAYWLENYANGSLGFLLADAGYDVWMGNSRGNTWSRRHKTLSETDEKFWAFSFDEMAKYDLPGVIDFIVNKTGQEKLYFIGHSLGTTIGFVAFSTMPELAQRIKMNFALGPTISFKYPTGIFTRFFLLPNSIIKAVFGTKGFFLEDKKTKIASTKICNNKILWLICSEFMSLWAGSNKKNMNQSRMDVYMSHAPTGSSVHNILHIKQLYHSDEFRAYDWGNDADNMKHYNQSHPPIYDLTAMKVPTAIWAGGHDVLVTPQDVARILPQIKSLHYFKLLPDWNHFDFVWGLDAPQRMYSEIIALMKAYS

SEQ ID NO: 415 - protein, 840 aa, Homo sapiens
MCTLCHATFYVLRAQCTVTSPMTERSKIHIVIIFTPIAITLYKVFLTVLTSVRIIFSSTSSQQKPIPRIFFWNEKGFRASQVTFVVLPTELRVNNSFGRFGEERSFYTPTSSKELHAWDIKQQLQKSGSSFSMYMTKFWTGARCQNTNTLPQRPLLMPLHALAGLAFHCLKHGENAWRARPSKCNPLVTANEHMELGRAHGRTERRKGWRCDSRAGALASPPRALAAGPGEMESTAYPLNLSLKEEEEEEEIQSRELEDGPADMQKVRICSEGGWVPALFDEVAIYFSDEEWEVLTEQQKALYREVMRMNYETVLSLEFPFPKPDMITRLEGEEESQNSDEWQLQGGTSAENEESDVKPPDWPNPMNATSQFPQPQHFDSFGLRLPRDITELPEWSEGYPFYMAMGFPGYDLSADDIAGKFQFSRGMRRSYDAGFKLMVVEYAESTNNCQAAKQFGVLEKNVRDWRKVKPQLQNAHAMRRAFRGPKNGRFALVDQRVAEYVRYMQAKGDPITREAMQLKALEIAQEMNIPEKGFKASLGWCRRMMRRYDLSLRHKVPVPQHLPEDLTEKLVTYQRSVLALRRAHDYEVAQMGNADETPICLEVPSRVTVDNQGEKPVLVKTPGREKLKITAMLGVLADGRKLPPYIILRGTYIPPGKFPSGMEIRCHRYGWMTEDLMQDWLEVVWRRRTGAVPKQRGMLILNGFRGHATDSVKNSMESMNTDMVIIPGGLTSQLQVLDVVVYKPLNDSVRAQYSNWLLAGNLALSPTGNAKKPPLGLFLEWVMVAWNSISSESIVQGFKKCHISSNLEEEDDVLWEIESELPGGGEPPKDCDTESMAESN

SEQ ID NO: 416 - protein, 436 aa, Homo sapiens
MTWLVLLGTLLCMLRVGLGTPDSEGFPPRALHNCPYKCICAADLLSCTGLGLQDVPAELPAATADLDLSHNALQRMRPGWLAPLFQLRALHLDHNELDALGRGVFVNASGLRLLDLSSNTLRALGRHDLDGLGALEKLLLFNNRLVHLDEHAFHGLRALSHLYLGCNELASFSFDHLHGLSATHLLTLDLSSNRLGHISVPELAALAGLPSKKGPSYWHNNPCALQTCRLYHLLQRWHQRGLSAVRDFAREYVCLAFKVPASRVRFFQHSRVFENCSSAPALGLERPEEHLYALVGRSLRLYCNTSVPAMRIAWVSPQQELLRAPGSRDGSIAVLADGSLAIGNVQEQHAGLFVCLATGPRLHHNQTHEYNVSVHFPAPRARGFQHRLHHTAGLCRGPCAHAALPVRPNLPTPAAVPAAAAAGPKHPARSQELSAQ

SEQ ID NO: 417 - protein, 349 aa, Homo sapiens
MKSLVLLLCLAQLWGCHSAPHGPGLIYRQPNCDDPETEEAALVAIDYINQNLPWGYKHTLNQIDEVKVWPQQPSGELFEIEIDTLETTCHVLDPTPVARCSVRQLKEHAVEGDCDFQLLKLDGKFSVVYACPLLAPLNDTRVVHAAKAALAAFNAQNNGSNFQLEEISRAQLVPLPPSTYVEFTVSGTDCVAKEATEAAKCNLLAEKQYGFCKATLSEKLGGAEVAVTCTVFQTQPVTSQPQPEGANEAVPTPVVDPDAPPSPPLGAPGLPPAGSPPDSHVLLAAPPGHQLHRAHYDLRHTFMGVVSLGSPSGEVSHPRKTRTVVQPSVGAAAGPVVPPCPGRIRHFKV

SEQ ID NO: 418 - protein, 349 aa, Homo sapiens
MKSLVLLLCLAQLWGCHSAPHGPGLIYRQPNCDDPETEEAALVAIDYINQNLPWGYKHTLNQIDEVKVWPQQPSGELFEIEIDTLETTCHVLDPTPVARCSVRQLKEHAVEGDCDFQLLKLDGKFSVVYAKCDSSPDSAEDVRKVCQDCPLLAPLNDTRVVHAAKAALAAFNAQNNGSNFQLEEISRAQLVPLPPSTYVEFTVSGTDCVAKEATEAAKCNLLAEKQYGFCKATLSEKLGGAEVAVTCTVFQTQPVTSQPQPEGANEAVPTPVVDPDAPPSPPLGAPGLPPAGSPPDSHVLLAAPPGHQLHRAHYDLRHTFMGVVSLGSPSGEVSHPRPPCPGRIRHFKV

SEQ ID NO: 419 - protein, 349 aa, Homo sapiens
MKSLVLLLCLAQLWGCHSAPHGPGLIYRQPNCDDPETEEAALVAIDYINLWPQQPSGELFEIEIDTLETTCHVLDPTPVARCSVRQLKEHAVEGDCDFQLLKLDGKFSVVYAKCDSSPDSAEDVRKVCQDCPLLAPLNDTRVVHAAKAALAAFNAQNNGSNFQLEEISRAQLVPLPPSTYVEFTVSGTDCVAKEATEAAKCNLLAEKQYGFCKATLSEKLGGAEVAVTCTVFQTQPVTSQPQPEGANEAVPTPVVDPDAPPSPPLGAPGLPPAGSPPDSHVLLAAPPGHQLHRAHYDLRHTFMGVVSLGSPSGEVSHPRKTRTVVQPSVGAAAGPVVPPCPGRIRHFKV

SEQ ID NO: 420 - protein, 621 aa, Homo sapiens
MSGCGLFLRTTAAARACRGLVVSTANRRLLRTSPPVRAFAKELFLGKIKKKEVFPFPEVSQDELNEINQFLGPVEKFFTEEVDSRKIDQEGKIPDETLEKLKSLGLFGLQVPEEYGGLGFSNTMYSRLGEIISMDGSITVTLAAHQAIGLKGIILAGTEEQKAKYLPKLASGEHIAAFCLTEPASGSDAASIRSRATLSEDKKHYILNGSKVWITNGGLANIFTVFAKTEVVDSDGSVKDKITAFIVERDFGGVTNGKPEDKLGIRGSNTCEVHFENTKIPVENILGEVGDGFKVAMNILNSGRFSMGSVVAGLLKRLIEMTAEYACTRKQFNKRLSEFGLIQEKFALMAQKAYVMESMTYLTAGMLDQPGFPDCSIEAAMVKVFSSEAAWQCVSEALQILGGLGYTRDYPYERILRDTRILLIFEGTNEILRMYIALTGLQHAGRILTTRIHELKQAKVSTVMDTVGRRLRDSLGRTVDLGLTGNHGVVHPSLADSANKFEENTYCFGRTVETLLLRFGKTIMEEQLVLKRVANILINLYGMTAVLSRASRSIRIGLRNHDHEVLLANTFCVEAYLQNLFSLSQLDKYAPENLDEQIKKVSQQILEKRAYICAHPLDRTC

SEQ ID NO: 421 - protein, 469 aa, Homo sapiens
MCVICFVKALVRVFKIYLTASYTYPFRGWPVAFRWDDVRAVGRSSSHRALTCAAAAAGVWLLRDETLGGDALGRPPRGARSQAQCLLQQLRELPGQLASYALAHSLGRWLVYPGSVSLMTRALLPLLQQGQERLVERYHGRRAKLVACDGNEIDTMFMDRRQHPGSHVHGPRLVICCEGNAGFYEMGCLSAPLEAGYSVLGWNHPGFGSSTGVPFPQHDANAMDVVVEYALHRLHFPPAHLVVYGWSVGGFTATWATMTYPELGALVLDATFDDLVPLALKVMPHSWKGLVVRTVREHFNLNVAEQLCCYPGPVLLLRRTQDDVVSTSGRLRPLSPGDVEGNRGNELLLRLLEHRYPVVMAREGRAVVTRWLRAGSLAQEAAFYARYRVDEDWCLALLRSYRARCEEELEGEEALGPHGPAFPWLVGQGLSSRRRRRLALFLARKHLKNVEATHFSPLEPEEFQLPWRL

SEQ ID NO: 422 - protein, 368 aa, Homo sapiens
MSGAPTAGAALMLCAATAVLLSAQGGPVQSKSPRFASWDEMNVLAHGLLQLGQGLREHAERTRSQLSALERRLSACGSACQGTEGSTDLPLAPESRVDPEVLHSLQTQLKAQNSRIQQLFHKVAQQQRHLEKQHLRIQHLQSQFGLLDHKHLDHEVAKPARRKRLPEMAQPVDPAHNVSRLHHGGWTVIQRRHDGSVDFNRPWEAYKAGFGDPHGEFWLGLEKVHSITGDRNSRLAVQLRDWDGNAELLQFSVHLGGEDTAYSLQLTAPVAGQLGATTVPPSGLSVPFSTWDQDHDLRRDKNCAKSLSGGWWFGTCSHSNLNGQYFRSIPQQRQKLKKGIFWKTWRGRYYPLQATTMLIQPMAAEAAS

SEQ ID NO: 423 - protein, 250 aa, Homo sapiens
MVRMVPVLLSLLLLLGPAVPQENQDGRYSLTYIYTGLSKHVEDVPAFQALGSLNDLQFFRYNSKDRKSQPMGLWRQVEGMEDWKQDSQLQKAREDIFMETLKDIVEYYNDSNAQITKQKWEAEPVYVQRAKAYLEEECPATLRKYLKYSKNILDRQDPPSVVVTSHQAPGEKKKLKCLAYDFYPGKIDVHWTRAGEVQEPELRGDVLHNGNGTYQSWVVVAVPPQDTAPYSCHVQHSSLAQPLVVPWEAS

SEQ ID NO: 424 - protein, 867 aa, Homo sapiens
MLWFSGVGALAERYCRRSPGITCCVLLLLNCSGVPMSLASSFLTGSVAKCENEGEVLQIPFITDNPCIMCVCLNKEVTCKREKCPVLSRDCALAIKQRGACCEQCKGCTYEGNTYNSSFKWQSPAEPCVLRQCQEGVVTESGVRCVVHCKNPLEHLGMCCPTCPGCVFEGVQYQEGEEFQPEGSKCTKCSCTGGRTQCVREVCPILSCPQHLSHIPPGQCCPKCLGQRKVFDLPFGSCLFRSDVYDNGSSFLYDNCTACTCRDSTVVCKRKCSHPGGCDQGQEGCCEECLLRVPPEDIKVCKFGNKIFQDGEMWSSINCTICACVKGRTECRNKQCIPISSCPQGKILNRKGCCPICTEKPGVCTVFGDPHYNTFDGRTFNFQGTCQYVLTKDCSSPASPFQVLVKNDARRTRSFSWTKSVELVLGESRVSLQQHLTVRWNGSRIALPCRAPHFHIDLDGYLLKVTTKAGLEISWDGDSFVEVMAAPHLKGKLCGLCGNYNGHKRDDLIGGDGNFKFDVDDFAESWRVESNEFCNRPQRKPVPELCQGTVKVKLRAHRECQKLKSWEFQTCHSTVDYATFYRQYQTYLPAVDLGHRIGQALGSLGHNERPGDELCLCGSNWGKFFIPCAYEIPAMGFFPNSTHILEEIVATEHLLHARFCHRDGDLELSKRDKALPSENHCLVLMRLDEVSLVNPRWNDQGVSFSSSHHQQGLVALVRTGLSAVVSGRPLKNQDIHLGARTPCKQEDLGWVSSEQQGPLREGTLASVLFWEQYQGFGLGLRAVLGLTAIQDSVRFPINLAKIKIDGGMCKYEIGVEAFAFLDTPTHCTLFIRKSETQSHFSSDLASKRSSRVAALSMTLAHRDGAVV

SEQ ID NO: 425 - protein, 424 aa, Homo sapiens
MRPVSVWQWSPWGLLLCLLCSSCLGSPSPSTGPEKKAGSQGLRFRLAGFPRKPYEGRVEIQRAGEWGTICDDDFTLQAAHILCRELGFTEATGWTHSAKYGPGTGRIWLDNLSCSGTEQSVTECASRGWGNSDCTHDEDAGVICKDQRLPGFSDSNVIEVEHHLQVEEVRIRPAVGWGRRPLPVTEGLVEVRLPDGWSQVCDKGWSAHNSHVVCGMLGFPSEKRVNAAFYRLLAQRQQHSFGLHGVACVGTEAHLSLCSLEFYRANDTARCPGGGPAVVSCVPGPVYAASSGQKKQQQSKPQGEARVRLKGGAHPGEGRVEVLKASTWGTVCDRKWDLHAASVVCRELGFGSAREALSGARMGQGMGAIHLSEVRCSGQELSLWKCPHKNITAEDCSHSQDAGVRCNLPYTGAETRVSHPLYLG

SEQ ID NO: 426 - protein, 307 aa, Homo sapiens
MALPPGPAALRHTLLLLPALLSSGWGELEPQIDGQTWAERALRENERHAFTCRVAGGPGTPRLAWYLDGQLQEASTSRLLSVGGEAFSGGTSTFTVTAHRAQHELNCSLQDPRSGRSANASVILNVQFKPEIAQVGAKYQEAQGPGLLVVLFALVRANPPANVTWIDQDGPVTVNTSDFLVLDAQNYPWLTNHTVQLQLRSLAHNLSVVATNDVGVTSASLPAPGPSRHPSLISSDSNNLKLNNVRLPRENMSLPSNLQLNDLTPDSRAVKPADRQMAQNNSRPELLDPEPGGLLTSQGRRNQDKDA

SEQ ID NO: 427 - protein, 160 aa, Homo sapiens
MGTHHTLWMGLALLGGLGDLQAAPEAQGSVQPNFQQDKFLGRWFSAGLASNSSWLREKKAALSMCKSVVAPATDGGLNLTSTFLRKNQCETRTMLLQPAGSLGSYSYRSPREWGLHRPPGPSLGATLAGTTLGQPPAAEIHGVGGDGCPTSVRGKGQAWA

SEQ ID NO: 428 - protein, 587 aa, Homo sapiens
MHAALAGPLLAALLATARARPQPPDGGQCRPPGSQRDLNSFLWTIRRDPPAYLFGTIHVPYTRVWDFIPDNSKAAFQASTRVYFELDLTDPYTISALASCQLLPHGENLQDVLPHELYWRLKRHLDYVKLMMPSWMTPAQRGKGLYADYLFNAIAGNWERKRPVWVMLMVNSLTERDVRFRGVPVLDLYLAQQAEKMKKTTGAVEQVEEQCHPLNNGLNFSQVLFALNQTLLQQESVRAGSLQASYTTEDLIKHYNCGDLSAVIFNHDTSQLPNFINTTLPPHEQVTAQEIDSYFRQELIYKRNERMGKRVMALLRENEDKICFFAFGAGHFLGNNTVIDILRQAGLEVDHTPAGQAIHSPAPQSPAPSPEGTSTSPAPVTPAAAVPEAPSVTPTAPPEDEDPALSPHLLLPDSLSQLEEFGRQRKWHKRQSTHQRPRQFNDLWVRIEDRARQRGSVWTLELSQAGCVALGCPVCLLKLLVPFSIVLGKIDLKKSDLSPKASAQDEAADGDSAMCFLLSSTTASPPPLPLQPTHSSGTAKPPFQLSDQLQQQDPPGPASSSAPTLGLLPAIATTIAVCFLLHSLGPS

SEQ ID NO: 429 - protein, 237 aa, Homo sapiens [sequence omitted]

SEQ ID NO: 430 - protein, 122 aa, Homo sapiens
MAALGTVLFSVRRLHCSAAAWAGGQWRLQQGLAANPSGYGPLTELPDWSYADGRPAPPMKGQLRRKAERETFARRVVLLSQEMDAGLQAWQLRQQKLQEEQRKQENALKPKGASLKSPLPSQ

SEQ ID NO: 431 - protein, 496 aa, Homo sapiens
MMFRSDRMWSCHWKWKPSPLLFLFALYIMCVPHSVWGCANCRVVLSNPSGTFTSPCYPNDYPNSQACMWTLRAPTGYIIQITFNDFDIEEAPNCIYDSLSLDNGESQTKFCGATAKGLSFNSSANEMHVSFSSDFSIQKKGFNASYIKVAVSLRNQKVILPQTSDAYQVSVAKSISIPELSAFTLCFEATKVGHEDSDWTAFSYSNASFTQLLSFGKAKSGYFLSISDSKCLLNNALPVKEKEDIFAESFEQLCLVWNNSLGSIGVNFKRNYETVPCDSTISKVIPGNGKLLLGSNQNEIVSLKGDIYNFRLWNFTMNAKILSNLSCNVKGNVVDWQNDFWNIPNLALKAESNLSCGSYLIPLPAAELASCADLGTLCQDGIIYRISVVIQNILRHPEVKVQSKVAEWLNSTFQNWNYTVYVVNISFHLSAGEDKIKVKRSLEDEPRLVLCALLVYNATNNTNLEGKIIQQKLLKNNESLDEGLRLHTVNVRQLGK

SEQ ID NO: 432 - protein, 503 aa, Homo sapiens
MDLIPNFAMETWVLVATSLVLLYIYGTHSHKLFKKLGIPGPTPLPFLGTILFYLRGLWNFDRECNEKYGEMWGLYEGQQPMLVIMDPDMIKTVLVKECYSVFTNQMPLGPMGFLKSALSFAEDEEWKRIRTLLSPAFTSVKFKEMVPIISQCGDMLVRSLRQEAENSKSINLKDFFGAYTMDVITGTLFGVNLDSLNNPQDPFLKNMKKLLKLDFLDPFLLLIALFPFLTPVFEALNIGLFPKDVTHFLKNSIERMKESRLKDKQKHRVDFFQQMIDSQNSKETKSHKALSDLELVAQSIIIIFAAYDTTSTTLPFIMYELATHPDVQQKLQEEIDAVLPNKAPVTYDALVQMEYLDMVVNETLRLFPVVSRVTRVCKKDIEINGVFIPKGLAVMVPIYALHHDPKYWTEPEKFCPERFSKKNKDSIDLYRYIPFGAGPRNCIGMRFALTNIKLAVIRALQNFSFKPCKETQIPLKLDNLPILQPEKPIVLKVHLRDGITSGP

SEQ ID NO: 433 - protein, 440 aa, Homo sapiens
MQPSSLLPLALCLLAAPASALVRIPLHKFTSIRRTMSEVGGSVEDLIAKGPVSKYSQVVPAVTEGPIPEVLKNYMDAQYYGEIGIGTPPQCWAPIPEVLKNYMDAQYYGEIGIGTPPQCFTVVFDTGSSNLWVPSIHCKLLDIACWIHHKYNSDKSSTYVKNGTSFDIHYGSGSLSGYLSQDTVSVPCQSASSASALGGVKVERQVFGEATKQPGITFIAAKFDGILGMAYPRISVNNVLPVFDNLMQQKLVDQNIFSFYLSRDPDAQPGGELMLGGTDSKYYKGSLSYLNVTRKAYWQVHLDQVEVASGLTLCKEGCEAIVDTGTSLMVGPVDEVRELQKAIGAVPLIQGEYMIPCEKVSTLPAITLKLGGKGYKLSPEDYTLKVSQAGKTLCLSGFMGMDIPPPSGPLWILGDVFIGRYYTVFDRDNNRVGFAEAARL

SEQ ID NO: 434 - protein, 256 aa, Homo sapiens
MKRERGALSRASRALRLAPFVYLLLIQTDPLEGVNITSPVRLIHGTVGKSALLSVQYSSTSSDRPVVKWQLKRDKPVTVVQSIGTEVIGTLRPDYRDRIRLFENGSLLLSDLQLADEGTYEVEISITDDTFTGEKTINLTVDVPISRPQVLVASTTVLELSEAFTLNCSHENGTKPSYTWLKDGKPLLNDSRMLLSPDQKVLTITRVLMEDDDLDSCVVENPINQGRTLPCKITVYKKSSFYIICLKEASSSFGPW

SEQ ID NO: 435 - protein, 983 aa, Homo sapiens
MCLLRLHGSVGGAQNLSALGALVSLSNARLSSIKTRFEGLCLLSLLVGESPTELFQQHCVSWLRSIQQVLQTQDPPATMELAVAVLRDLLRYAAQLPALFRDISMNHLPGLLTSLLGLRPECEQSALEGMKACMTYFPRACGSLKGKLASFFLSRVDALSPQLQQLACECYSRLPSLGAGFSQGLKHTESWEQELHSLLASLHTLLGALYEGAETAPVQNEGPGVEMLLSSEDGDAHVLLQLRQRFSGLARCLGLMLSSEFGAPVSVPVQEILDFICRTLSVSSKNISLHGDGPLRLLLLPSIHLEALDLLSALILACGSRLLRFGILIGRLLPQVLNSWSIGRDSLSPGQERPYSTVRTKVYAILELWVQVCGASAGMLQGGASGEALLTHLLSDISPPADALKLRSPRGSPDGSLQTGKPSAPKKLKLDVGEAMAPPSHLLLPVPCKPSPSASEKIALRSPLSCSEALVTCAALTHPRVPPLQPMGPTCPTPAPVPLLRPHRPSGPHRSILRAPCPQWAPCPQQAPCPSAGPMPSAGPVPSEPWTSTTANLLGLLSRPSVCPPRLLPGPENHRAGSNEDPILAPSGTPPPTIPPDETFGGRVPRPAFVHYDKEEASDVEISLESDSDDSVVIVPEGLPPLPPPPPSGATPPPIAPTGPPTASPPVPAKEEPEELPAAPGPLPPPPPPPPPVPGPVTLPPPQLVPEGTPGGGGPPALEEDLTVININSSDEEEEEEGEEEEEEEEEEEEEEEEEEEEEEEDFEEEEEDEEEYFEEEEEEEEEFEEEFEEEEGELEEEEEEEDEEEEEELEEVEDLEFGTAGGEVEEGAPPPPTLPPALPPPESPPKVQPEPEPEPGLLLEVEEPGTEEERGADTAPTLAPEALPSQGEVEREGESPAAGPPPQELVEEEPSPPPTLLEEETEDGSDKVQPPPETPAEEEMETETEAEALQEKEQDDTAAMLADFIDCPPDDEKPPPPTEPDS

SEQ ID NO: 436 - protein, 157 aa, Homo sapiens
MLRGTMTAWRGMRPEVTLACLLLATAGCFADLNEVPQVTVQPASTVQKPGGTVILGCVVEPPRMNVTWRLNGKELNGSDDALGVLITHGTLVITALNNHTVGRYQCVARMPAGAVASVPATVTLASESAPLPPCHGAVPPHLSHPEAPTIHAASCYS

SEQ ID NO: 437 - protein, 136 aa, Homo sapiens
MAGVCLSVLAARVSALLHHWPFVSVPSTGLLKAQKTPPGYFPFLWASHSCYSLLPFSTWRPPFLLLLCCPHLHLGPPSSREMAEPHSPPASHPLQRSSQAVLSMAASTAPGCHPRFRVASDSRPAPPRLAQMDPLQ

SEQ ID NO: 438 - protein, 111 aa, Homo sapiens
MCAFPWLLLLLLLQEGSQRRLWRWCGSEEVVAVLQESISLPLEIPPDEEVENIIWSSHKSLATVVPGKEGHPATIMVTNPHYQGQILTMLLRSLQQPSASWPRDCSSSCSW

SEQ ID NO: 439 - protein, 91 aa, Homo sapiens
MATWALLLLAAMLLGNPGLEVSVSPKGKNTSGRESGFGWAIWMEGLVFSRLSPEYYDLARAHLRDEEKSLPCLAQEAPQGDLLTKTPELGP

SEQ ID NO: 440 - protein, 684 aa, Homo sapiens [sequence omitted]

SEQ ID NO: 441 - protein, 425 aa, Homo sapiens
MVSKALLRLVSAVNRRRMKLLLGIALLAYVASVWGNFVNMSFLLNRSIQENGELKIESKIEEMVEPLREKIRDLEKSFTQKYPPVKFLSEKDRKRILITGGAGFVGSHLTDKLMMDGHEVTVVDNFFTGRKRNVEHWIGHENFELINHDVVEPLYIEVDQIYHLASPAPPPNYMYNPIKTLKTNTIGTLNMLGLAKRVGARLLLASTSEVYGDPEVHPQSEDYWGHVNPIGPRACYDEGKRVAETMCYAYMKQEGVEVRVARIFNTFGPRMHMNDGRVVSNFILQALQGEPLTVYGSGSQTRAFQYVSDLVNGLVALMNSNVSSPVNLGNPEEHTILEFAQLIKNLVGSGSEIQFLSEAQDDPQKRKPDIKKAKLMLGWEPVVPLEEGLNKAIHYFRKELEYQANNQYIPKPKPARIKKGRTRHS

SEQ ID NO: 442 - protein, 489 aa, Homo sapiens
MKTLIHPCSQGIVIFSRSWAGDVGFRKEQNVLCDALLIAVNSPVVLYTILIDPNWPGGLEYARNTAHQLKQKLQTVGGYTGKVCIIPRLIHLSSTQSRPGEIPLRYPRSYRLADEEEMEDLLQALVVVSLSSRSLLSDQMGCEFFNLLIMEQSQLLSESLQKTRELFIYCFPGVRKTALAIKIMEKIKDLFHCKPKEILYVCESDSLKDFVTQQTTCQAVTRKTFMQGEFLKIKHIVMDETENFCSKYGNWYMKAKNITHPKAKGTGSENLHHGILWLFLDPFQIHHADVNGLPPPSAQFPRKTITSGIHCALEIAKVMKEEMKRIKENPPSNMSPDTLALFSETAYEEATCAQALPGVCETKTNLTTEQIANYVARKCHSLFQCGYLPKDIAILCRRGEDRGRYRLALLKAMELIETHRPSEVVFSPATGVWGSHIVLDSIQQFSGLERTVVFGLSPECDQSEEFHKLCFASRAIKHLYLLYEKRAAY

SEQ ID NO: 443 - protein, 424 aa, Homo sapiens
MAGSQGLLIFRDVAIEFSPEEWSYLDPAQQNLYRDVMLENYRNLVSLGIAVSKPDLITCLEQRNEPWNVKKHETVARHPAVSSHFTQDLLPEHGIKDSFQKVILRRYGSYGIENLQLKKDWESVGESKVQKECCNGLNQSLSTTHTKIFQFNKCVKVFSKSSNLNRHKIRHTGEISSNCKECDNSFYISSVLTPLQRIHTAEKSYKCKQCGKAFRHCSCFLEHETIHNEEKHYKCKECGKVFKSFTSLSNHIIIHTGKKLYKCEECGKAFNHSSNHAKHKKIHTGQKPHKCEECGKAFNWFSYLTLHKRIHTGEKPYKCDECGKAFNQCSNLTKHKRIHTGEKPYKCEECGKAFNRCSHLTEHKRIHTGEKPYKCEECGKVFISCSSLSNHKRIHTREKCYKSEECGKTFNHCSDLNVPEKIHT

SEQ ID NO: 444 - protein, 84 aa, Homo sapiens
MVLASFTQNMNIKCCEFVCQVVQKYIINNLVKKRNCEPSWSVYSILCLYVIFSSNRFIIIGFTKRSRKKSEGEIASTALQATSG

SEQ ID NO: 445 - protein, 63 aa, Homo sapiens [sequence omitted]

SEQ ID NO: 446 - protein, 62 aa, Homo sapiens
MQGTWLPPSFLAVCDTEEVSLFLELCFKIHVTCKAVLICDYGPMELGQSLWEAEGKDPGHFR

SEQ ID NO: 447 - protein, 497 aa, Homo sapiens
MYYCCIYLNSAVNHISLSVLKLNVASYLQMICLTENFRTDVKDFVTLLTANTCDIRKSILYLQFWIRSGGGVLEERPLTLYRGNSRNVQLVCSEHGLDNKIYPKNTKKKRVDLPKCDSGCAETLFGLKNIFSPSEDLFSFLKHKITMKEEWHKFIQLLTEFQMRNVDFLYSNLEFILPLPVDTIPETKNFCGPSVTVDASAATKSMNCLARKHSEREQPLKKSQKKKQKKTLVILDDSDLFDTDLDFPDQSISLSSVSSSSNAEESKTGDEESKARDKGNNPETKKSIPCPPKTTAGKKCSALVSHCLNSLSEFMDNMSFLDALLTDVREQNKYGRNDFSWTNGKVTSGLCDEFSLESNDGWTSQSSGELKAAAEALSFTKCSSAISKALETLNSCKKLGRDPTNDLTFYVSQKRNNVYFSQSAANLDNAWKRISVIKSVFSSRSLLYVGNRQASIIEYLPTLRNICKTEKLKEQGKSKRRFLHYLKEFILTFQKRL

SEQ ID NO: 448 - protein, 130 aa, Homo sapiens
MAFCLRASLGPDCCCWYQSPETLPPWSPCMPSCSYCLVALKQHISTVPGRIVGGFTTPAFLTSSSAQHWVPLPSFPAGASWATVSGSGPARVVLLFLLLLGNHTWQVKCPKHLVSLPKNKPFLCTSLEAR

SEQ ID NO: 449 - protein, 243 aa, Homo sapiens
MIVGTGGVGGGVGCEAGSRPRRRKSLKAVAMLAVEMGGGCRGSMGPGPGYSAGSRVCRGSSLPQVAPFNPSRAHLLPPPVGGGLNSVWLSGVQLSTPPYADWEGVGQSPQPRGPWMGSSSLGTVGPGCVLSGCPTVKANGGSPCSEMLGERRLLEPSVGPVSGCPERREGGHGARGAAGVVVKGHASVQLNFLSLIMFYPPCPFFPQLCFCIFFLGKCKLSLSFMTCEISVSLEFVRRRGNHA

SEQ ID NO: 450 - protein, 628 aa, Homo sapiens
MALTQGPLKFMDVAIEFSQEEWKCLDPAQRTLYRDVMLENYRNLVSLGICLPDLSVTSMLEQKRDPWTLQSEEKIANDPDGRECIKGVNTERSSKLGSNAGNKPCKNQLGFTFQLHLSDLQLFQAERKISGCKHFEKPVSDNSSVSPLEKISSSVKSHLLNKYRNNFDHAPLLPQEQKAHIREKAYKCNEHGQVFRASASLTNQVIHNADNPYKCSECGKVFSCSSKLVIHRRMHTGEKPYKCHECGKLFSSNSNLSQHQRIHTGEKPYKCHECDKVFRSSSKLAQHQRIHTGEKPYKCHECDKVFNQIAHLVRHQKIHTGEKPYSCNKCGKVFSRHSYLAEHQTVHTGEKPYKCEECGKAFSVRSSLITHQLIHTGRKPYKCKECDKVFGRKCFLTSHQRIHTRERPYGCSQCGKIFSQKSDLIRHRKTHTDEKPYKCNKCGTAFREFSDLTAHFLIHSGEKPYECKECGKVFRYKSSLTSHHRIHTGEKPYKCNRCGKVFSRSSNLVCHQKIHTGEKPYKCNQCGKVFNQASYLTRHQIIHTGERPYRCSKCGKAFRGCSGLTAHLAIHTEKKSHECKECGKIFTQKSSLTNHHRIHIGEKPYKCTLCSKVFSHNSDLAQHQRVHS

SEQ ID NO: 451 - protein, 89 aa, Homo sapiens
MFAQNFLRGLSLQKSNLLPECCLASENLTLSFPSVNGHRCVAQGSETSESRAQWHGVALVVRKVIGQLYCKRNKYVVQFCKCQVCSIVL

SEQ ID NO: 452 - protein, 75 aa, Homo sapiens
MVNYCSLRSLIITYDLQICLEMWTFCICFCIWRDVCIYPGRIHTHFHISLQIYFPFNRDLVFGTLLFIWLIFLLM

SEQ ID NO: 453 - protein, 93 aa, Homo sapiens
MPLASPIQHHEVTRGVAPSMALRDGVCRIPLSAEFTAQCTDSQAPQMKRAPRCCCLAVVAQCPHHCPVLGCWSGCRCCCYCVFELHWLYCIQE

SEQ ID NO: 454 - protein, 91 aa, Homo sapiens
MTAFGLGIPTFLVMQPSGSQPRFPALTQNGVALVRTPLTSVYLRVRPILPAGLCLGVTLPELAPTTVATVMLMCDCCQEPAHMTVWRKFFP

SEQ ID NO: 455 - protein, 261 aa, Homo sapiens
MPSDPGPEAGSGWPGLLMSCLKGPHVILKMEAMKIVHPEKFPELPAAPCFPPAPRPTPTLAPKRAWPSDTEIIVNQACGGDMPALEGAPHTPPLPRRPRKGSSELGFPRVAPEDEVIVNQYVIRPGPSASAASSAAAGEPLECPTCGHSYNVTQRRPRVLSCLHSVCEQCLQILYESCPKYKFISCPTCRRETVLFTDYGLAALAVNTSILSRLPPEALTAPSGGQWGAEPEGSCYQTFRQYCGAACTCHVRNPLSACSIM

SEQ ID NO: 456 - protein, 430 aa, Homo sapiens
MAAVVLPPTAALSSLFPASQREGHTEGGELVNELLKSWLKGLVTFEDVAVEFTQEEWALLDPAQRTLYRDVMLENCRNLASLGNQVDKPRLISQLEQEDKVMTEERGILSGTCPDVENPFKAKGLTPKLHVFRKEQSRNMKMERNHLGATLNECNQCFKVFSTKSSLTRHRKIHTGERPYGCSECGKSYSSRSYLAVHKRIHNGEKPYECNDCGKTFSSRSYLTVHKRIHNGEKPYECSDCGKTFSNSSYLRPHLRIHTGEKPYKCNQCFREFRTQSIFTRHKRVHTGEGHYVCNQCGKAFGTRSSLSSHYSIHTGEYPYECHDCGRTFRRRSNLTQHIRTHTGEKPYTCNECGKSFTNSFSLTIHRRIHNGEKSYECSDCGKSFNVLSSVKKHMRTHTGKKPYECNYCGKSFTSNSYLSVHTRMHNRQM

SEQ ID NO: 457 - protein, 56 aa, Homo sapiens
MHIFSICCMSSELHKMKSLSLQLASEKRSLVALVEEIVFLLLRVSPCLGPSLSPRL

SEQ ID NO: 458 - protein, 95 aa, Homo sapiens [sequence omitted]

SEQ ID NO: 459 - protein, 56 aa, Homo sapiens
MPCSNATVPDGECCPRCWPRCDCSRGAWADGKQTCCPLMTICAEKAPNAGVRGTTN

SEQ ID NO: 460 - protein, 146 aa, Homo sapiens
MLLWCPPQCACSLGVFPSAPSPVWGTRRSCEPATRVPEVWILSPLLRHGGHTQTQNHTASPRSPVMESPKKKNQQLKVGILHLGSRQKKIRIQLRSQCATWKVICKSCISQTPGINLDLGSGVKVKIIPKEEHCKMPEAGEEQPQV

SEQ ID NO: 461 - protein, 314 aa, Homo sapiens
MGLLDSEPGSVLNVVSTALNDTVEFYRWTWSIADKRVENWPLMQSPWPTLSISTLYLLFVWLGPKWMKDREPFQMRLVLIIYNFGMVLLNLFIFRELFMGSYNAGYSYICQSVDYSNNVHEVRIAAALWWYFVSKGVEYLDTVFFILRKKNNQVSFLHVYHHCTMFTLWWIGIKWVAGGQAFFGAQLNSFIHVIMYSYYGLTAFGPWIQKYLWWKRYLTMLQLIQFHVTIGHTALSLYTDCPFPKWMHWALIAYAISFIFLFLNFYIRTYKEPKKPKAGKTAMNGISANGVSKSEKQLVIENGKKQKNGKAKGD

SEQ ID NO: 462 - protein, 96 aa, Homo sapiens
MVSAVSDPPTSTTGSTMCECISIHVGQAGVQMGNACWELYCLEHDIQPSGTMPSHKALGSSDNSFNTFFRETQPGRHVSWAVCGPGACCHSTMKSL

SEQ ID NO: 463 - protein, 816 aa, Homo sapiens
MLENYFNLISVGCQVPKPEVIFSLEQEEPCMLDGEIPSQSRPDGDIGFGPLQQRMSEEVSFQSEININLFTRDDPYSILEELWKDDEHTRKCGENQNKPLSRVVFINKKTLANDSIFEYKDIGEIVHVNTHLVSSRKRPHNCNSCGKNLEPIITLYNRNNATENSDKTIGDGDIFTHLNSHTEVTACECNQCGKPLHHKQALIQQQKIHTRESLYLFSDYVNVFSPKSHAFAHESICAEEKQHECHECEAVFTQKSQLDGSQRVYAGICTEYEKDFSLKSNRQKTPYEGNYYKCSDYGRAFIQKSDLFRCQRIHSGEKPYEYSECEKNLPQNSNLNIHKKIHTGGKHFECTECGKAFTRKSTLSMHQKIHTGEKPYVCTECGKAFIRKSHFITHERIHTGEKPYECSDCGKSFIKKSQLHVHQRIHTGENPFICSECGKVFTHKTNLIIHQKIHTGERPYICTVCGKAFTDRSNLIKHQKIHTGEKPYKCSDCGKSFTWKSRLRIHQKCHTGERHYECSECGKAFIQKSTLSMHQRIHRGEKPYVCTECGKAFFHKSHFITHERIHTGEKPYECSICGKSFTKKSQLHVHQQIHTGEKPYRCAECGKAFTDRSNLFTHQKIHTGEKPYKCSDCGKAFTRKSGLHIHQQSHTGERHYECSECGKAFARKSTLIMHQRIHTGEKPYICNECGKSFIQKSHLNRHRRIHTGEKPYECSDCGKSFIKKSQLHEHHRIHTGEKPYICAECGKAFTIRSNLIKHQKIHTKQKPYKCSDLGKALNWKPQLSMPQKSDNGEVECSMPQLWCGDSEGDQGQLSSI

SEQ ID NO: 464 - protein, 132 aa, Homo sapiens
MPLEVVVELQIRAISCPGVFLPGKQDVYLGVYLMNQYLETNSFPSAFPIMIQESMRFEKGIAPKIEFSTRTAIRECVFLHRNRFLGWGNKGKMLVQQEHRSLKKKLNRNGTQTSGEGLLSWMLLQEFEGRKT

SEQ ID NO: 465 - protein, 221 aa, Homo sapiens [sequence omitted]

SEQ ID NO: 466 - protein, 389 aa, Homo sapiens
MDSVSFEDVAVAFTQEEWALLDPSQKNLYRDVMQEIFRNLASVGNKSEDQNIQDDFKNPGRNLSSHVVERLFEIKEGSQYGETFSQDSNLNLNKKVSTGVKPCECSVCGKVFICHSALHRHILSHIGNKLFECEECPEKLYHCKQCGKAFISLTSVDRHMVTHTSNGPYKGPVYEKPFDFPSVFQMPQSTYTGEKTYKCKHCDKAFNYSSYLREHERTHTGEKPYACKKCGKSFTFSSSLRQHERSHTGEKPYECKECGKAFSRSTYLGIHERTHTGEKPYECIKCGKAFRCSRVLRVHERTHSGEKPYECKQCGKAFKYSSNLCEHERTHTGVKPYGCKECGKSFTSSSALRSHERTHTGEKPYECKKCGKAFSCSSSLRKHERAYMW

SEQ ID NO: 467 - protein, 117 aa, Homo sapiens
MPSCSCALMAPCGPAAGPAAVERTQQAARGEPGSARGQLQVSPEMSITHKEKENAHLKEILLFVNAEAFSQPQPHSAPVCEGQQLTGKFSTSVLTRAGGDASPCSWERLLCYGWSHC

SEQ ID NO: 468 - protein, 137 aa, Homo sapiens
MPSLPTTNCVHSLQMIPPLSPAPNQELVLGLCYMSYLAFLYMTFDFCCLYFSTVYAPSFKYICVHTDTHICVCVCIYLSSVVSKSSAEADGVLQPRRHPASLLIVFATSISESSLLIFSFQKTEAKLIVFAVSLAAK

SEQ ID NO: 469 - protein, 116 aa, Homo sapiens
MSVGFIGAGQLAYALARGFTAAGILSAHKIIASSPEMNLPTVSALRKMGVNLTRSNKETVKHSDVLFLAVKPHIIPFILDEIGADVQARHIVVSCAAGVTISSVEKKLMAFQPAPK

SEQ ID NO: 470 - protein, 688 aa, Homo sapiens
MAAALRAPTQVSAASSRPPLPSPPETEGRVKGFLQPGPHCPAQCLCSGDDGSNEDLEQKREVIFPRPHEAPVAEHRQQTVGLRELVAIPKRKEETTAIVQVFVAFEDVAIYFSQEEWELLDEMQRLLYRDVMLENFAVMASLGCWCGAVDEGTPSAESVSVEELSQGRTPKADTSTDKSHPCEICTPVLRDILQMIELHASPCGQKLYLGGASRDFWMSSNLHQLQKLDNGEKLFKVDGDQASFMMNCRFHVSGKPFTFGEVGRDFSATSGLLQHQVTPTIERPHSRIRHLRVPTGRKPLKYTESRKSFREKSVFIQHQRADSGERPYKCSECGKSFSQSSGFLRHRKAHGRTRTHECSECGKSFSRKTHLTQHQRVHTGERPYDCSECGKSFRQVSVLIQHQRVHTGERPYECSECGKSFSHSTNLYRHRSAHTSTRPYECSECGKSFSHSTNLFRHWRVHTGVRPYECSECGKAFSCNIYLIHHQRFHTGERPYVCSECGKSFGQKSVLIQHQRVHTGERPYECSECGKVFSQSSGLFRHRRAHTKTKPYECSECEKSFSCKTDLIRHQTVHTGERPYECSVCGKSFIRKTHLIRHQTVHTNERPYECDECGKSYSQSSALLQHRRVHTGERPYECRECGKSFTRKNHLIQHKTVHTGERPYECSECGKSFSQSSGLLRHRRVHVQ

SEQ ID NO: 471 - protein, 405 aa, Homo sapiens
MALKVATVAGSAAKAVLGPALLCRPWEVLGAHEVPSRNIFSEQTIPPSAKYGGRHTVTMIPGDGIGPELMLHVKSVFRHACVPVDFEEVHVSSNADEEDIRNAIMAIRRNRVALKGNIETNHNLPPSHKSRNNILRTSLDLYANVIHCKSLPGVVTRHKDIDILIVRENTEGEYSSLEHESVAGVVESLKIITKAKSLRIAEYAFKLAQESGRKKVTAVHKANIMKLGDGLFLQCCREVAARYPQITFENMIVDNTTMQLVSRPQQFDVMVMPNLYGNIVNNVCAGLVGGPGLVAGANYGHVYAVFETATRNTGKSIANKNIANPTATLLASCMMLDHLKLHSYATSIRKAVLASMDNENGLVCAEPACVLQMHTPDIGGQGTTSEAIQDVIRHIRVINGRAVEA

SEQ ID NO: 472 - protein, 600 aa, Homo sapiens
MIKFQERVTFKDIAVIFTKEELAVLDKAQINLYQDVMLENFRNFISVGDSQILFLLMGDGIKNNILNLQGKGLIYLSQEELHCWKIWKQRIRDLSVSQDYIMNLQEQCSPHLEDVSLCEEWAGMSLQISENENYVVNAIIKNQDITAWQSLTQVLTPESWRKANIMTEPQKSQERYKGIYVEEKLYRRVRHDESLNWTSCDHHESQECKGEDPGRHPNCGKNLGMKSTVEQHHVVHVLPQPFTCNNCGVAFADDTDPRAHHSTHLGEKSYKCDQYGKNLSQSQYLIIHCKTHSRETPYELHEWPTGCKQSSDLPRCQKVPSGDNPYKCKECGKGFRCNSSLHNHHRVHTGEMPYKCHVCGKAFGFRSLPCIHQGVHTGKKPYKCEDCGKGFEQSSNLLIHQRVHTGEKPYKSSECGKCFSSSSVLQVHWRFHTGEKPYRCGECGKGFSQSTHLHIHQRVHTGEKQYNAMCVERILGIVLFFTLIREFTLQKNHINAKCVESALVTVHIFTSIKAITQERNHINVMSVVKASVGIQIFNVHLRVHRGQRPCKCKACGKGFSRNSHLLAQQRVRIDKTQYTHCEHGKDLLTHQRLHEQRETL

SEQ ID NO: 473 - protein, 171 aa, Homo sapiens
MQRNSTHAAYATQLTLYATQLALHMQFNSHCVCKSTYCICNSTHCVCNSTRTAYATQLALRMQLNSHCVCNSARTAYATQLLQVLISGHFLFLTTTPSQYFSSLKSAQDEALDSRTCCMPLGLLEVCRLASPRLHPALSCLSCENPVASASPGSDFCLLPSSAAPLGPCLE

SEQ ID NO: 474 - protein, 461 aa, Homo sapiens
MGLLAFRDVALEFSPEEWECLDPAQRSLYRDVMLENYRNLISLGEDSFNMQFLFHSLAMSKPELIICLEARKEPWNVNTEKTAKHSVLSSYLTEDILPEQGLQVSFQKVMLRRYERCCLEKLRLRNDWEIVGEWKGQKASYNGLDLCSATTHSKNFQCNKCVKGFSKFANLNKCKISHTGEKPFKCKECGNVSCMSLIMTQQQRIHIGENPYQCKKCGKAFNECSCFTDCKRIHVGEKHCKCEECNNIFKSCSSLAVVEKNHTEKKTYRCEECGKAFNLCSVLTKHKKIHTGEKPYKCEECGKSFKLFPYLTQHKRIHSREKPYKCEECGKVFKLLSYLTQHRRIHTGEKTFRCEECGKAFNQSSHLTEHRRIHTGEKPYKCEECGKAFTWFSYLIQHKRIHTGQKPYKCEECGKAFTWFSYLTQHKRIHTGEKPYKCDECGKAFNWFSYLTNHKRIHTEE

SEQ ID NO: 475 - protein, 499 aa, Homo sapiens
MAALFLSAPPQAEVTFEDVAVYLSREEWGRLGPAQRGLYRDVMLETYGNLVSLALGTRTEYKELTSQETFGEEDPQGSEPVEACDHISKSEGSLEKLVEQRGPRAVTLTNGESSRESGGNLRLLSRPVPDQRPHKCDICEQSFEQRSYLNNHKRVHRSKKTNTVRNSGEIFSANLVVKEDQKIPTGKKLHYCSYCGKTFRYSANLVKHQRLHTEEKPYKCDECGKAFSQSCEFINHRRMHSGEIPYRCDECGKTFTRRPNLMKHQRIHTGEKPYKCGECGKHFSAYSSLIYHQRIHTGEKPYKCNDCGKAFSDGSILIRHRRTHTGEKPFECKECGKGFTQSSNLIQHQRIHTGEKPYKCNECEKAFIQKTKLVEHQRSHTGEKPYECNDCGKVFSQSTHLIQHQRIHTGEKPYKCSECGKAFHNSSRLIHHQRLHHGEKPYRCSDCKKAFSQSTYLIQHRRIHTGEKPYKCSECGKAFRHSSNMCQHQRIHLREDFSM

SEQ ID NO: 476 - protein, 409 aa, Homo sapiens
MSGSCSSRKCFSVPATSLCSTEVSCGGPICLPSSCQSQTWQLVTCQDSCGSSSCGPQCRQPSCPVSSCAQPLCCDPVICEPSCSVSSGCQPVCCEATTCEPSCSVSNCYQPVCFEATICEPSCSVSNCCQPVCFEATVCEPSCSVSSCAQPVCCEPAICEPSCSVSSCCQPVGSEATSCQPVLCVPTSCQPVLCKSSCCQPVVCEPSCCSAVCTLPSSCQPVVCEPSCCQPVCPTPTCSVTSSCQAVCCDPSPWSSASAICRPTCPRTFYIPSSSKRPCSATISYRPVSRPICRPICSGLLTYRQPYMTSISYRPACYRPCYSILRRPACVTSYSCRPVYFRPSCTESDSCKRDCKKSTSSQLDCVDTTPCKVDVSEEAPCQPTEAKPISPTTREAAAAQPAASKPANC

SEQ ID NO: 477 - protein, 552 aa, Homo sapiens
MLALKAAFGEALFTAQDEALLLRRLTLAAQHPALPPPTHLFYLHCVLSFPENWPLGPEGEEAAPLLLGPQLCRGLLPSLLHDPMALLARLHLLCLLCAEEEEEEKGQLPSPRHYLEELLAGLRQRAALDGGPRALATLCFQASYLVACCLAGQPTVLTPLIHGLAQLYQARPMLAPHFVDLLDQVDSELREPLKVVLRQVVVSRPGRDEALCWHLQMLAKVADGDAQSATLNFLQAAAAHCTNWDLQQGLLRVCRALLRAGVRGGLVDLLQVLARQLEDPDGRDHARLYYILLAHLAAPKLGVALGPSLAAPALASSLVAENQGFVAALMVQEAPALVRLSLGSHRVKGPLPVLKLQPEALEPIYSLELRFRVEGQLYAPLEAVHVPCLCPGRPARPLLLPLQPRCPAPARLDVHALYTTSTGLTCHAHLPPLFVNFADLFLPFPQPPEGAGLGFFEELWDSCLPEGAESRVWCPLGPQGLEGLVSRHLEPFVVVAQPPTSYCVAIHLPPDSKLLLRLEAALADGVPVALRTDDWAVLPLAGDYLRGLAAAV

SEQ ID NO: 478 - protein, 58 aa, Homo sapiens [sequence omitted]

SEQ ID NO: 479 - protein, 221 aa, Homo sapiens
MAAVGPRTGPGTGAEALALAAELQGEATCSICLELFREPVSVECGHSFCRACIGRCWERPGAGSVGAATRAPPFPLPCPQCREPARPSQLRPNRQLAAVATLLRRFSLPAAAPGEHGSQAAAARAAAARCGQHGEPFKLYCQDDGRAICVVCDRAREHREHAVLPLDEAVQEAKELLESRLRVLKKELEDCEVFRSTEKKESKELLVSQAPAGPPWDITEA

SEQ ID NO: 480 - protein, 545 aa, Homo sapiens
MDCVIFEEVAVNFTPEEWALLDHAQRSLYRDVMLETCRNLASLDCYIYVRTSGSSSQRDVFGNGISNDEEIVKFTGSDSWSIFGENWRFDNTGDQHQIPQRHLRSQLGRLCESNEGHQCGETLSQTANLLVHKSYPTEAKPSECTKCGKAFENRQRSHTGQRPCKECGQACSCLSCQSPPMKTQTVEKPCNCQDSRTASVTYVKSLSSKKSYECQKCGKAFICPSSFRGHVNSHHGQKTHACKVCGKTFMYYSYLTRHVRTHTGEKPYECKECGKAFSCPSYFREHVRTHTGEKPYECKHCGKSFSCYSSFRDHVRTHTGEKPCQCKHCGKAFTCYSSLREHGRTHSGEKPYECKECGKAFRYPSSLRAHMRMHTGEKPYVCKQCGKAFGCPTYFRRHVKTHSGVKPYQCKECGKAYSFSSSLRIHVRTHTGEKPFECKHCGKAFSCHSSLREHVRTHSGEKPYECNQCGKAFSHAQYFQKHVRSHSGVKPYECTECGKAYSCSSSLRVHVRTHTGERPYECKQCGKTFRYLASLQAHVRTHAGA

SEQ ID NO: 481 - protein, 691 aa, Homo sapiens
MLMAASVARKAVVLPGGTATSPKMIAKNVLGLVPQALPKADGRAGLGTGGQKVNGASVVMVQPSKTATGPSTGGGTVISRTQSSLVEAFNKILNSKNLLPAYGPNLSPPAEAGLALPPTGYRCLECGDAFSLEKSLARHYDRRSMRIEVTCNHCARRLVFFNKCSLLLHAREHKDKGLVMQCSHLVMRPVALDQMVGQPDITPLLPVAVPPVSGPLALPALGKGEGAITSSAITTVAAEAPVLPLSTEPPAAPATSAYTCFRCLECKEQCRDKAGMAAHFQQLGPPAPGATSNVCPTCPMMLPNRCSFSAHQRMHKNRPPHVCPECGGNFLQANFQTHLREACLHVSRRVGYRCPSCSVVFGGVNSIKSHIQTSHCEVFHKCPICPMAFKSGPSAHAHLYSQHPSFQTQQAKLIYKCAMCDTVFTHKPLLSSHFDQHLLPQRVSVFKCPSCPLLFAQKRTMLEHLKNTHQSGRLEETAGKGAGGALLTPKTEPEELAVSQGGAAPATEESSSSSEEEEVPSSPEPPRPAKRPRRELGSKGLKGGGGGPGGWTCGLCHSWFPERDEYVAHMKKEHGKSVKKFPCRLCERSFCSAPSLRRHVRVNHEGIKRVYPCRSKGPGLRAVPLLPSCPLPFQVLHRGKTHLQQPPDPRETCPGPARLAAWGPVPWPGDHLGSGFQCQSPGARSETPPVF

SEQ ID NO: 482 - protein, 180 aa, Homo sapiens
MRGPWGKDSRGKAQTRECDNSREHLTCVQNKTKTNKYFKVLIRKSNVWIVSAESYSNLYLISVSGASWSEAKESGLHPEQGGAGPSPPSPSPPWHTREAGPSSEPLLTPGVLTFLKVVGAVRRGSLARFLNWAGLGAYEGRFTVPPDSLLTPKQNACKRHPFSHPPYWCPQTPGLLRRWW

SEQ ID NO: 483 - protein, 115 aa, Homo sapiens
MSPGYTFKTALAVLYLVHMIQNMFPYNMGLSLLANPAPSSSSNLLSEASALHLLLADGNLQGKAEGFLGKPGKPVFPMCQICLASKKGCMGFLASVSRRLWASCFFPASPRVHRC

SEQ ID NO: 484 - protein, 102 aa, Homo sapiens
MGTRCQLLAPSTPIARAAGTCRVAELGRTHPITMSTVVLLLQRSVSNAATRVCRTGRSRWRDVCRNFMRRYQSRVTQGLVAGETAQQICEDLRLCIPSTGPL

SEQ ID NO: 485 - protein, 173 aa, Homo sapiens
MCLLLGATGVGKTLLVKRLQEVSSRDGKGDLGEPPPTRPTVGTNLTDIVAQRKITIRELGGCMGPIWSSYYGNCRSLLFVMDASDPTQLSASCVQLLGLLSAEQLAEASVLILFNKIDLPCYMSTEEMKSLIRLPDIIACAKQNITTAEISAREGTGLAGVLAWLQATHRAND

SEQ ID NO: 486 - protein, 202 aa, Homo sapiens [sequence omitted]

SEQ ID NO: 487 - protein, 641 aa, Homo sapiens
MEKVLGCELLKGLNVLDLGLNMEILEEQMLHEILCREYPELETRWQDLKIRALDTCKAVEAAEGQIHPTNECMQERLLTMLLFQNPKRQKPAKFLRNIVRAQGKLCQLRAHCEELEGQKLQEMVLWAPYRPVVWHGMAMVKALSQLQNLLPLFCMSPENWLAVTKQALDSMKPREINHGEDLASHLLQLRAHLTRQLLGSTVTALGLTQVPLVGALGALALLQATGKASELERLALWPGLAASPSTVHSKPVSDVARPAWLGPKAWHECEMLELLPPFVGLCASLAGHSSAWQAYLSLSSTVLGPAPGPGPEPLSLLQKLILWRVLRPECLAGALADFTTSLLGRPLDENTYAPTMPFKHSQATQPMLILLPPPGHPSATLHPLTVIQKLAAKYQQGQKQLQVIALGSEAWDPVSVVVSTLSQAMYEGHWLVLDNCHLMPHWPKELLQLLLELLGRAKVVADLESEQLLDQPESRNVSTVHRDFRLWLIVPAESSASLPAVLTQHSMPVFWNQSLELGHVLIDSVELAQQVLYMQPPTQALPLLLLHGLLLHRQLYGTRLQAHRGRWSQVTLTQVLQTQDQLWASLSNPRAAMQELAGETLPLPLGVISPQESLEEGGGGIQFTALVLAVVETEGTGTERL

SEQ ID NO: 488 - protein, 456 aa, Homo sapiens
MDTVVFEDVVVDFTLEEWALLNPAQRKLYRDVMLETFKHLASVDNEAQLKASGSISQQDTSGEKLSLKQKIEKFTRKNIWASLLGKNWEEHSVKDKHNTKERHLSRNPRVERPCKSSKGNKRGRTFRKTRNCNRHLRKNCCTSVRRYECSQCGKLFTHSSSLIRHKRAHSGQKLYKCKECGKAFSRPSYLQTHEKTHSGEKPYACQSCGKTFLRSHSLTEHVRTHTGEKPYECGQCGKGFSCPKSFRAHVMMHAGGRPYECKHCGKAFRCQKSFRVHMIMHAGGRPYECKQCGKAYCWATSFQRHVRIHNGEKPYKCGKCGKAFGWPSSLHKHARTHAKKKPVSGGSVGKSSARPRPSTDVKSQTREKVYKCETCGKTYGWSSSLHKHERKHTGEKPVNAASVGKPSGGLCSSKNVRTQIGQKPSKCEKCGKAFSCPKAFQGHVRSHTGKKSCTSK

SEQ ID NO: 489 - DNA, 2219 bp, Homo sapiens
cgggcggtcgggcgggaacgcagtgttgttggagagcgggggcccggcttcgcggcatttcgccctctccggcccttccggaggctccgggtttgtgccgtgtgcgtgcggggctcggcgctggggcgctcggtaggtctcccgcggggaggaggcggcgggggccccgtgtttcttcctccccggccccccacccgcgccgtgtcttatgtcgctgccttctcttcctgtttttcagctgtcacgaccggaggggggactcgcagccttaccaggcacttaagtattcatcgaagagtcaccccagtagcggtgatcacagacatgaaaagatgcgagacgccggagatccttcaccaccaaataaaatgttgcggagatctgatagtcctgaaaacaaatacagtgacagcacaggtcacagtaaggccaaaaatgtgcatactcacagagttagagagagggatggtgggaccagttactctccacaagaaaattcacacaaccacagtgctcttcatagttcaaatttcacattctttctaattccaagcaattaaccccaaggcaaaactttcaggattgcaccttatgattctggcagatgactgggtctggagcatattagctcttctggggaaaagtactactacaattgtcgaacagaagtttcacaatggggaaaaaccccaaagagtggcttggaaagaggacagagacaaaaagaagcaaacaagatggcagtcaacagcttcccaaaagatagggattacagaagagaggtgatgcaagcaacagccactagtgggtttgccagtggaaaatctacatcaggagacaaacccgtatcacattcttgcacaactccttccacgtcttctgcctctggactgaaccccacatctgcacctccaacatctgcttcagcgggtccctgtttctccgtgttccacagctcgccaatacctcccttacttcaggacccaaatcttcttagacaattgctgtcctgctttggaagccacgctgcagcttaataattctaatgtggacataatctataataaatgaagttcttacaggagatgtgacacaagcctcactgcagactataattcataagtgtcttactgctggaccatctgttttcaaaataacgtctctgatttctcaagctgctcagctctctacacaagcccaggcatctaatcagtctccgatgtctttaacatctgatgcgtcatccccaaggatcatatgtttctccaaggaataaggcacacctcaaacttaacacagtccctattcaaacctttggattcagtactcctcctgtttcatcacagccaaaggttagtactccagtagttaagcaaggaccagtgtcacagtcagccacacagcagcctgtaactgctgacaagcagcaaggtcatgaacctgtctctcctcgaagtcttcagcgctcaagtagccagagaagtccatcacctggtcccaatcatacttctaatagtagtaatgcatcaaatgcaacagttgtaccacagaattcttctgcccgatccacgtgttcattaacgcctgcactagcagcacacttcagtgaaaatctcataaaacacgttcaaggatggcctgcagatcatgcagagaagcaggcatcaagattacgcgaagaagcgcataacatgggaactattcacatgtccgaaatttgtactgaattaaaaaatttaagatctttagtccgagtatgtgaaattcaagcaactttgcgagagcaaaggatactatttttgagacaacaaattaaggaacttgaaaagctaaaaaatcagaattccttcatggtgtgaagatgtgaataattgcacatggttttgagaacaggaactgtaaatctgttgcccaatcttaacatttttgagctgcatttaagtagactttggaccgttaagctgggcaaaggaaatgacaaggggacggggtctgtgagagtcaattcaggggaaagatacaagattgatttgtaaaacccttgaaatgtagatttcttgtagatgtatccttcacgttgtaaatatgttttgtagagtgaagccatgggaagccatgtgtaacagagcttagacatccaaaactaatcaatgctgaggtggctaaatacctagccttttacatgtaaacctgtctgcaaaattagcttttttaaaaaa

SEQ ID NO: 490 - DNA, 1078 bp, Homo sapiens
tttcgtccgggaggagccgccggggcagaagccgcacttgttagtgttgggggaggtgggggcgggggacgccgacaccgtcaccgtcacccagggacgccgaggagaaggcgggaggggggtgggggcgagatcaggctccgaccccccgccgaggggatgaggggagcatgggtgccaaggagtcacggatcggattcctcagctacgaggaggcgctgaggagagttacagatgtagagctaaaacgactgaaggatgctttcaagaggacctgtggactctcatattacatgggccagcactgcttcatccgggaagtgcttggggatggagtgcctccaaaggttgctgaggtgatttactgttcttttggtggaacatccaaagggctgcacttcaataatttaatagttggacttgtcctccttacaagaggcaaagatgaagagaaagcaaaatacatttttagtcttttttcaagtgaatctgggaactatgttatacgggaagaaatggaaagaatgctccacgtggtggatggtaaagtcccagatacactcaggaagtgtttctcagagggtgaaaaggtaaactatgaaaagtttagaaattggctttttctaaacaaagatgcttttactttctctcgatggcttctatctggaggtgtgtatgttaccctcactgatgatagtgatactcctactttctaccaaactctggctggagtcacacatttggaggaatcagacatcattgatcttgagaaacgctattggttattgaaggctcaatcccggactggacgatttgatttagagacatttggcccattggtttcaccacctattcgtccatctctaagtgaaggtttgtttaatgcttttgatgaaaatcgtgacaatcacatagattttaaggagatatcctgtgggttatcagcctgttgcaggggacccctggctgaaagacaaaaattttgcttcaaggtatttgatgttgaccgtggatgagttctctccagggttgaactgagagacaatatgggtgcacttttagaagtctggaaggacaa

SEQ ID NO: 491 - DNA, 2588 bp, Homo sapiens
agtggtagaatgattccattagaggcaaaaagcatggtttagcaatatgtagattattaaaattatttgttctagcacaaactaaccttggatagtgtttggtcctagaaaaagtagacaagtaaaatctgagtcatgtttgggagagggaaacgggtcactatttgagatttccatctttagatcattcctttggctgactataaatctcccatttggtcttagagattactaaaacgcttcagagatcatgagttataatattcaaggactgaaataagcatttctcttttcagactcccaagaagagtcaccagaaatctctgagcttttctaaaactacaccaagaaggatctctcatacaccacaaactccgttgtatactccagaaaggctgcagaagtcccctgcaaaaatgacccctacaaagcaggcagcttttaaggagtccttaaaagactcctcctcacccggccatgactcaccattggattcaaaaatcactcctcaaaaacgacatacccaggcaggagaaggtacctctcttgaaacgaagacaccaagaactcctaagaggcaaggtactcagccgcctgggtttttgccaaactgtacttggccacattcagtgaattccagtccagaaagcccctcctgtccagcccctccaacttcatcgactgcccagcccaggagagagtgtctcactcccatcagagaccctctcagaacacctccgagagcagcagccttcatgggcacgcctcagaatcaaacacaccaacagccccatgtcctcagagctgctcgggcagaggaaccagcccagaaactaaaggataaagctatcaaaactccaaaaagaccagggaattcaactgtgacttcttccccacctgttacgccaaagaaactgtttacctctcctttatgtgatgtctccaagaagagtccatttaggaaatctaaaatagagtgtccttccccaggagaactggatcagaaagagccccagatgtcacccagcgtagctgcatctctctcctgccctgttccctcaactccccctgaactctcacagagagctacattggacaccgtccctcctccacccccttctaaagttgggaaacggtgtagaaagacctctgatcccagaaggaagcttcgtggagtgtcagcttgatgcctccgctactcctggggttggcacagctgacagcccagctgcccccacagactctagagatgaccagaagggactgagcctctctcctcagtctcctcctgaaagacggggctacccaggccctggtctcaggagtgattggcatgcatcctctcctctgctcattacaagtgacacagagcatgtcactctcctcagtgaagccgaacaccatggcattggtgacttgaaaagtaacgtcttatcagtggaagagggtgaggggctaaggacagcagatgctgagaagtcttctctgtctcaccctgggattcccccatctcctccttcctgtgggcctggctctcctctgatgccttcccgtgacgtgcactgtaccacagatgggagacagtgccaggcttcggcacaactagacaacctgccagcatcagcttggcattccacagactctgccagcccacagacctatgaggttgagctggagatgcaagcttctggccttcccaaacttcgaattaagaagatagaccccagctcttcattagaggctgagcccctcagcaaggaggagagctctctgggagaagagagcttcctccctgctctcagcatgcccagggccagcaggtccttaagcaaacctgaacccacctatgtgtcacccccctgcccccgcctctcccacagcacacctggcaagagcagggggcaaacctacatctgccaggcctgtacccccacccacggcccttctagtaccccctctccatttcaaacagatggggttccttggacaccatcccccaagcacagtgggaagacaactccagacataattaaagactggcccaggaggaagagggcggtgggctgtggcgccggctcctcttccgggaggggcgaggtcggtgcagaccttcctgggagcctgtcactgcttgagtcagagggcaaggaccacggccttgaactcagcatccacaggacgcccatcttggaggattttgagctcgagggagtgtgccagctcccagaccagtcgcctcccaggaacagcatgcctaaggccgaggaagcctcttcctggggacagtttgggttgagttccaggaagagagtcctgttggccaaggaagaagctgaccgtggagccaaaaggatctgtgacctgagagaagattcagaagttagtaagagtaaagaggggtctccaagttggagtgcatggcagctaccctccacgggagacgaagaggtgtttgtttccggctccaccccacctcccagctgtgccgtgcggagctccctctcctgccagtgccctccaggctctgacccagtctccgctgctgttccaggggaaaacaccttcctctcagagcaaagaccccagag

SEQ ID NO: 492 - DNA, 3183 bp, Homo sapiens
tgaaatcgaattgccgtgctcagaggatttgaatttggaaactttgtcccaagcacatgtctacataattgcaggagcctgcttgtctctgggttttcgatttgctggctcagaaaacttatcagcatttaactgtttgcataaatttgccaaagattttatgacttatttgtccgcacctaatgcttctgttacaggtcctcataacctagaaacttgtctgagcgtggtgctgctgtctctcgccatggtcatggctggctcaggaaacctaaaggttttgcagctttgtcgcttcttacacatgaaaacgggtggtgaaatgaactatggttttcacttagcccaccacatggcccttggacttctatttttgggaggaggaaggtactctttgagcacatcaaattcttccattgccgctcttctctgtgccctttatccgcacttcccagctcacagcactgacaaccggtatcatctccaggctctccggcacctctatgtgctggccgcggagcccaggcttctagtgcctgtggatgtggacacaaacacgccctgctatgccctcttagaagttacctacaagggcactcagtggtatgaacaaaccaaagaagaattgatggctcctacccttcttccagaactccatcttttaaagcagattaaagtaaaaggcccaagatactgggaactgctcatagatttaagcaaaggaacacaacacttgaagtccatcctttccaaggatggggttttatatgttaaactccgggcgggtcagctctcctacaaagaagatccaatgggatggcaaagtttgttggctcagactgttgctaacaggaactctgaagcccgggctttcaagccagaaacaatctcagcattcacttctgatccagcacttctgtcatttgctgaatatttctgcaagccaactgtgaacatgggtcagaaacaggaaattctggatctcttttcttcagtactctatgaatgtgttacccaggagaccccagagatgttgcctgcatacatagcaatggatcaggctataagaagacttgggagaagagaaatgtctgagacttctgaactttggcagataaagttggtgttagagtttttcagctcccgaagccatcaggagcggctgcagaaccaccctaagcgggggctctttatgaactcggaattcctccctgttgtgaagtgcaccattgataataccctggaccagtggctacaagtcgggggtgatatgtgtgtgcacgcctacctcagcgggcagcccttggaggaatcacagctgagcatgctggcctgcttcctcgtctaccactctgtgccagctccacagcacctgccacctataggactagaagggagcacaagctttgctgaactgctcttcaaatttaagcagctaaaaatgccagtgcgagctttgctgagattggctcctttgcttcttggaaatccacagccaatggtgatgtgaccgtgtctggcggtgaacctaccctgaaacgtgacttctgcacaacaaacgtgaccaaacatcaaagctaaagcaatgtttataaagttttatggtataactagggggaaatgagctgcacaaacctcaatgtattttaaatctgttgctgtcatcattaacggtatatgacatataaaagcaagttaaaatttacttttgtaaataaagtttttggtttgtttccaaaactcttgatgattgctttagttttggacttatagaatagagcaggggttgctggagtgaatattgatttttaaagtctttgaactgtggtggtataggtgaagtgactatgcccaaaaatgccaagttttaaaagaagctatgtcataaagttttactttctgtgggcaaaagagcgctttagccatttcctcagatgtcacagttgtcctgtctaaaataagtttgtacttctggtgacaatgccagacactcttatgatgtgatcaccttaaacaggagaaggagatttttgccctcagttgctcaacatgaagtactgtggactgaattgtgtcctcccagaattatatattgaggccctaatccctgtgtgactgtattaggcaatagggcatataggagattactaaggttaagtgaggtcatcataagggtggggccttaattcagtagaattggtggcctcctaagcagaggaagagagatttttctttctctctctgccatgtgaagacagtgaggagtcggccgtctgcaagccaagaagagcccttatcaggaacagacttggctagcaccttcatcgtggacctccagcctccagaattgccaagaaaatacattttccgtcgttgaaacccacccagtctgtggtattttgttatggcagcccaggcagactaatacgtgaagcctgctctaaatagataaaataagaaattactacagagggctctttagaaattgtatttaaaaacaagacaatccatatttacctaagatttacagaatgtatgtctataaaaggagggatttctggactagatgatgatgaaaaatgttcatataaaggcacctccagcttcgagttgccaacacaggaggaagaatgctccctgctgttcagatgctgatatgtgtcctgtgcttcctggaatggccagtgggatcataagctggtagaagcaagaccttcatccactgacttcatatttcttccacatcctgaactgtggtgtttgactttaaaaataaattaaagcaaatagaaatgtttcccattgagattttggcaaaaacccacatgacatttgcgtctgccagagtagacttggaaggcatgcaccctggaggccaagtggtattctctggactctctgtccttgcatttgcgtggctgccccgaggactcgcttcttcctggatgtgaagcagaggcacgatggggctgactgagaggctgaaatgtgcttctcttcacagttacatagttttcttctaattaaaaataaattttaagtggtagattatgaaaattccatttgaatcaagattttaaaaattcaatatcaaaccagttgttactgtcttcactctccgttgtttacgattgtgtgcttttccctgaataaagaatgactggagagacattaaaaaaaaaa

SEQ ID NO: 493 - DNA, 542 bp, Homo sapiens
  misc_feature (1)...(542): n = a,t,c or g
ccgagccccttgttcgatattaccacccaccgtcttatttcctttccgccacttcacttttatactattcactactcacagagcaggnnnnaccntttcgagacctttgtaagccctcggaannccgggggnggnggtggnggggctgggacaggngatgggggnggaggaggaaacaccttgctgctttcaggagggggaggagggaagtccggagaagggactgggatggagctgggctgccacttgggctttgcttttactgcaggaggggactgtggagctacatttgctgggacaggctttaagggctgagattccatggcagggggagttggagggggtggaaactggctggctatctgcttcacgaccgagggcaccggtgacagtggagagggagggggttttgcacagaagctctgttgcttgggtaatgttggcggcggtactggaacaggaggggtagggggagagggtggaatgtaagaagcagggaaagctggctgcttttttgctgtgggcactggaggagtacgtgn

SEQ ID NO: 494 - DNA, 2771 bp, Homo sapiens
atggactacatccgcaccgacctaaccaccgccgcgcccagcccgccgcgccgcctggggccgccaccgcccggcgagcagccgccttcgggcagtggccacgtccgcccgccgggggccaggcccccgcaccgaggtggcggcaggggcggtggcggcggggacccggcggcgcccccagctcgcggcggcggcggtggcgggaaggcgcggccccctggcggcggcgcggctccctgcgagcccgggtgccagtgccgcgcgcctatggtgagcgtgtccagcgagcgccacccgctctacaaccgcgtcaagacaggccagatcgctaactgcgcgctgccctgccacaacccctttttcagccaggacgagcgcgccttcaccgtcttctggatcggcctgtggtcggtgctctgcttcgtgtccaccttcgccaccgtctccaccttccttatcgacatggagcgcttcaagtacccggagcggcccattatcttcctctcggcctgctacctcttcgtgtcggtgggctacctagtgcgcctggtggcgggccacgagaaggtggcgtgcagcggtggcgcgccgggcgcggggggcgctgggggcgcgggcggcgcggcggcgggcgcgggcgcggcgggcgcgggcgcgggcggcccgggcgggcgcggcgagtacgaggagctgggcgcggtggagcagcacgtgcgctacgagaccaccggccccgcgctgtgcaccgtggtcttcttgctggtctacttcttcggcatggccagctccatctggtgggtgatcttgtcgctcacatggttcctggcggccggtatgaagtggggcaacgaagccatcgccggctactcgcagtacttccacctggccgcgtggcttgtgcccagcgtcaagtccatcgcggtgctggcgctcagctcggtggacggcgacccggtggcgggcatctgctacgtgggcaaccagagcctggacaacctgcgcggcttcgtgctggcgccgctggtcatctacctcttcatcggcaccatgttcctgctggccggcttcgtgtccctcttccgcatccgctcggtcatcaagcaacaggacggccccaccaagacgcacaagctggagaagctgatgatccgcctgggcctgttcaccgtgctctacaccgtgcccgccgcggtggtggtcgcctgcctcttctacgagcagcacaaccgcccgcgctgggaggccacgcacaactgcccgtgcctgcgggacctgcagcccgaccaggcacgcaggcccgactacgccgtcttcatgctcaagtacttcatgtgcctagtggtgggcatcacctcgggcgtgtgggtctggtccggcaagacgctggagtcctggcgctccctgtgcacccgctgctgctgggccagcaagggcgccgcggtgggcgggggcgcgggcgccacggccgcggggggtggcggcgggccggggggcggcggcggcgggggacccggcggcggcggggggccgggcggcggcgggggctccctctacagcgacgtcagccactggcctgacgtggcggtcgggcacggcgagctccgtgtcttatccaaagccagatgccattgtcccaggtttgagcggaggggagggggcgcccaggaaggggtggggaggggggcgagaagaaacccaagtgcaagcgaagggacacttgatgggctgaggttcccaccccttcacagtgttgattgctattagcatgataatgaactcttaatggtatccattagctgggacttaaatgactcacttagaacaaagtacctggcattgaagcctcccagacccagccccttttcctccattgatgtgcggggagctcctcccgccacgcgttaatttctgttggcctgaggagggtggacctctgcgggcgtttcccagaaccccgaggattttggagccctcccctggctgcacttggctgggtttgcagtccagatacacagatttcaccctgggagaacccctttttctccctcgactcttcctacgtaaactcccacccctgacttaccctgggaggaggggttaccgccacctgatgggattgcacggttttgggtattctttaatgaccatggcaaatgccttaagtaaacaaacaagaaatgtcttaattatacaccccacggtaaatacgggtttcttacattagaggatgtatttatataattatttgttaaattgtaaaaaaaaaaagtgtaaaatatgtatatatccaaagatatagtgtgtacatttttttgtaaaaagtttagaggcttacccccctgtaagabacagatataaagtattctattttgtcgaataaaatgacttttgataaatgatttaaccattgccctctcccccgccttttttgagctgtcacctttaaagtgcttgctaaggacgcatggggaaaatggacattttctggcttgtcattctgtacactgaccttaggcatggagaaaattacttgttaaactctagttcttaagttgttagccaagtaaatatcattgttgaactgaaatcaaaatgagtttttgcaccttccccaaagacggtgtttttcatgggagctcttttttgatccatggataacaactctcactttagtggatgtaaatggaacttctgcaaggcagtaattccccttaggccttgttatttatcctgcatggtatcactaaaggtttcaaaaccctgaaaaaaaa

SEQ ID NO: 495 - DNA, 1730 bp, Homo sapiens
ggggcactattatcacaccagatgaatacactggaaaaataatgatgctttgcgaggctcgaagagcagttcagaagaatatgatatttattgatcaaaatagagttatgcttaaatatctctttcctttgaatgaaattgtggtagatttttatgactctttgaaatccctatcttctggatatgctagttttgattacgaagatgcaggctaccagactgcagaacttgtaaaaatggatattctactgaatggaaatactgtagaggagctagtaactgttgtacacaaagacaaagctcattcaattggcaaagccatatgtgaacggctgaaggattctcttcctaggcaactgtttgagatagcaattcaagctgctattggaagtaaaatcattgcaagagaaactgtgaaagcctataggaaaaacgttttggcaaaatgttatggtggtgatattacccgaaaaatgaagcttttgaagagacaagcagaagggaaaaaaaagctgaggaaaattggcaacgttgaagttccaaaagatgcttttataaaagttctgaaaacacaatcttctaaataattggtgggaaaacaaagaattttcattgcaatttgtaatatgctgacaacagaaagaaaattataaaatttgcttgttactttcagggtattcaggttcaaataacctactagtctttcgttgaaagggagtagttagtgggtaggcaagagcttagattttgaagccatgttgcctgctctcaaatatctgttccaaccactcactagtaaggtgaccgtggccagattaacctttgtttcctcttcagtaaaatcgagattatactactacctacataagttgttgttgtgaagattaaatgaggtaatacgttaaatattcagaggtgcaagacacatagtaagcactcaattgtaactacagttaagtccttaaatgccatcgaaaggttcttagaaactgactttaagcaaaatgacacgtagcacaatgttcttgaatgatgtcatttccttaagtggtttgtaacatcgatgaggaaaaaaaattggtttatgcgtcatttcattttatttttatttattttttgagacagagtcttgccctgtcgcccatgctggagtgcaatggcacaatctcgactcactgcaacctctgcctcctgggttcaagagattctcctgcctcagcctccattacaggcgtgcaccaccatgctcggctaattttttgtatctttagtagagtcggggtttcaccatgttggccaggctggtcttgaactcctgacctcgtgatccacccaccgtggcctcccaaagtgctgattacaggtgtgagccaccatgcccagccatgtcatttcatttaaagtcacaatttccatgaatctcaacaagtgaggacctgctatattttgttgcatgcagtttttctttacggacactaaaaggccccatacttaagattccatctactttaagtttaaaggattttcagaatcaccttaagtgtcaaatttgttagcaggattaattgatatgaattcacttattaaacagtaaactcaaataacatagacatcaaataacagacatctgctctagttaatgataaaatgtttatagattttatcaggtgagtagtttgaaactaaatggtttacatctaaattaagggcaggagctgtctttcagacat

SEQ ID NO: 496 - DNA, 687 bp, Homo sapiens
  misc_feature (1)...(687): n = a,t,c or g
gccctgtttattctgcaaacaaggcttaaaaatgtatagacacaatttgtaggctgagaaatctctgtgtagttgggacttccatacttccgcaaaagtagtaaggacagcgacttctgaacacattaacctaccactgttttgtttagagcgaacacagggagaatggattcctaacggcctgtttctttaagggatcggcgcagttcgctgctctagtctttaagaacaagtggagccttcacttgagccgccacctccttgccattcagggcttcaacaattgcaagcgcaaactcgattctcagagtaggtgtaatgacctccattcatcattttgtctttagcaagagggtgtgttgtaactttacttccaaaacctatttcatgagccaacagagcagtaggacctgcacagatggcggctatcaggcccttccgttttcctgctcctcagtatctccttcacagcagcagactcagataaaatctgtgcgcccagattaccttctggtagaaccaccacatcatatgggtccctctttttttgcatcttcaggcctgcatcangaccaatgaccacatcacnggctacacttgtactgggtcttttcagccaggccctggaacggtgaccttaatnccagctcggctcatgacatctaacacgaatgaccgctccatttc

SEQ ID NO: 497 - DNA, 2652 bp, Homo sapiens
atgaaaatcctcaccaagcttggctacagcttgatcaccacggccgagtgggagatcatgcatgacaaggagaagctgtgttgcccttcgagcaggagatggccaccgccgcatcctcctcctccctggagaatagctgtgaggtgcccatggcaggtcatcgccattggcaacaagcagttccagtgtctggaggcactgttccagccttccttcctgggcatggaatgttgcagcatccacaagaccaccttcaactccatcatgaagtgtgatgtggacatctgcaaagacttatatgccaacacgatgcagaaggagatcactgccctggtgcccagcaccacgaagatcaagatcattgtgccccgccccaagcacaggtactcagtgtggatcggcagttccatcctggcctcactgtctaccttccagcagatgtggatcagcaagcaggagtcgactctagaggatcccccaatgggattaacagacatccctgagatgaaggccagaggaaacaaagacaccaggggtctgactgcagcaaagaaaccagagctgagcgagaaccaggacaacgggcacaagagagaccagcaaagcaggcgggatggcctgggaggctcctcacgacctccagctctgaagccaagagactacaattcacacagtgcactggctgaagggccaggagttgatgaggtagatccggtccatcatgatggtgatgatgctgtaccagcgctggaagcccctggccaggctgtccttgatgaagaaggtgtggctgaacacaaagccgtgctgctcatctccgaagaagatggggccttcacggccagggcagacctggagggacaccggcgactcagacagccctttcctcgcttagtgacaccaaatcaaaacctcttcttcagacttttcagagtcagctggcacaaatcagccagcgttaataacggggagagtggcacaggtcttagcacatacggtctctcactcagaatattcttccccaagcttgcatgccagcaggtcgactctagaggacccccagggatcaaggtccggcacgatcaagacccaggctacatgcatcacaagtttgccatcgtggacaagagggtgctcatcactggctcgctcaactggaccacgcaagccatccagaacaacagggagaatgttctcatcacggaggacgacgagtacgtgcggctttttctggaagaatttgagcgcatctgggaacagtttaaccctacaaatcacgacctgccacggggtgctttcatgagtgtggtccgtatcttggtttggaatcgaaacttctgctacagcacagaaaaggcacagtgcctcttccagaataccacagaaaaaagctttgatgaagacaacaggaagtcaacacagcagagagtggtgtggacaacccagaatgccagcctcacgcattccatgcccacagttaactgtgacaacgacagcaataataataataataataaaacaacggtacagtccctggattcaaagagcttcaaccgttcttgcaccgtcagaccttccttcagactctgggtagagacagagcaggaggagaaaataaacacaccgttagactccctgcactggagcggatcggaccagaccgggacgctggtggatgcgtcatcagtcagagagccgggtgcagagctggccaatgccaccttcctcttcttccgcctgctcaccctggccaggactgtcctcattcccatccccttgaggaagtggggcgtgcagcacctccgtgcagaagagagtgcgggggccgtggagctcgcagaagtggcagagagccacgatggcattcatggtgccttggagactgcaacaggcctgcgtgggacaggggacattgctgcttatggaccaaaaccctcagtgacggaagaggctaagtcagaatgtcagtcaatgatgtcgctaagcacactgtgtagttcagcaaacattgttcagcaagatttcttgctgcagcagttgcttgatgtatttattcgcgataagctcatggagcggcgtaaccgtcgcacaggaaggacagagaaagcgcggatctgggaagtgacggacagaacggtcaggacctggattggggaggcggttgcgcgactgctgctgacgcttgcatgcctgcaggtcgactctagaggatcccccgttgtcggcggcgtagttggtggcggcgctgaccaccatgcagccctgcggccggccgtgcgggttgtaggtcgacacggcttcgagcagcatcttctcgacggcttcgcggggaaggacagagaaagcgcggatctgggaagtgacggacagaacggtcaggacctggattggggaggcggttgcgcgtctgctgctgacggtgtgacgttctctgttccggtcacaccacatacgttccgccattcctatgcgatgcacatgctgtatgccggtataccgctgaaagttctgcaaagcctgatgggacataagtccatcagttcaacggaagtctacacgaaggtttttgcgctggatgtggctgcccggcaccgggtgcagtttgcgatgccggagtctgatgcggttgcgatgctgaaacaattatactga

SEQ ID NO: 498 - DNA, 1882 bp, Homo sapiens
  misc_feature (1)...(1882): n = a,t,c or g
ggacttcggcacgaggtcacactgcgggtgctcctcaaagacgcgctgctggagcctggcgccggggtgctgtccatctactacctggggaagaagttcctgggcgacctgcagccagacggaaggatcatgtggcaggagaccgggcagaccttcaactcacccagcgcctgggccacccactgcaagaagctggtgaaccctgccaagaagtcgggctgtggctgggcctctgtcaagtacaaaggccagaaactggacaagtacaaggccacctggctccggctgcaccagctgcacacgcctgccacggctgctgatgagagcccagccagtgaaggggaggaggaggagttgctgatggaagaggaggaggaggacgttctggcgggggtctcagcagaggacaagagtcggagaccactggggaagagcccttcagagcctgcccacccggaggccacaaccccagggaagcgggtggacagcaagatccgggttccggtccgctactgcatgctgggcagccgcgacttggccaggaacccccacaccctggtggaagtaacatcctttgcagccatcaacaagttccagccgttcaacgtggctgtttctagcaacgtgctgttcctgctggacttccacagtcacctgacacggagtgaggtcgtgggttacctggggggccgctgggacgtcaacagccagatgctgacggtgctcagagccttcccttgtcggagccggctcggggacgcaaagactgcagctgccatcgaagaggagatctaccagagcctgttcctgcggggcctgtccctggtgggctggtaccacagccacccgcacagcccggcgctgccatctctgcaggacatcgacgcacagatggactaccagctgcggctgcagggctccagcaatggcttccagccctgcctcgccctgctctgctccccttactattctggcaacccaggccccgagtccaagatctcgcctttctgggtgatgcctcctcccgagcaaaggcccagtgactatggcatccccatggatgtggagatggcctacgtccaggacagcttcctgaccaatgacatccttcacgagatgatgctgctggtggagttctacaagggttcccctgacctcgtgaggctccaggaaccctggagccaggagcacacctacctcgacaagcttaagatctccttggccagcaggacgcccaaggaccagagcctgtgtcacgtcctggaacaggtgtgcggcgtcctcaagcaggggagctgagccttccagggcagggtgggctccagttgtcttgagggtccggatgggctcaagttctggagggggtcaatgaagttctgcttgacctcgatgtccagggagtccttcacctctgccaggcgcttcatggactcgccggcatccagcaatgcgtcacctgtggagaagtggtgggggaagccatcataccgggcctgggaccactagactgagacactcctcagcctttgtttttgaaatagcgtttcacaggctggaacgcagtggcgctgtaccagctcactgcaggcctcaaactgggctcaagccatgctggcacctcagcctcccaagtagccgggaccacaggcgttcacccccacacctggatcctttccaacttctttgagatgaagtctcgctgttgcccaggctgcagtgcagtggcatgatctcagctcactgcaacctctgcctcccaggttcaagcaattctcctgtctcagcctcctgagtaagggggattacaggggcctgccaccacatccagctaatttttgtatttttaatagagacgggtttcaccatatagaccnacaaaaaa

SEQ ID NO: 499 - DNA, 389 bp, Homo sapiens
aaaattggtgactggtgtgatagcagtagcccagaagggggtggagggagcagggagcattgcagcagccactggctttgtcaaaaaggaccagttgggcaagaatgaagaaggagccccacaggaaggaattctggaagatatgcctgtggatcctgacaatgaggcttatgaaatgccttctgaggaagggtatcaagactacgaacctgaagcctaagaaatatctttgctcccagtttcttgagatctgctgacagatgttccatcctgtacaagtgctcagttccaatgtgcccagtcatgacatttctcaaagtttttacagtgtatctcgaagtctttcatcagcagtgattgaagtattttgtcctgcccccactcaacat

SEQ ID NO: 500 - DNA, 619 bp, Homo sapiens
atccaagtagagcagaaccggtaacacttctatgaactgtctctcgagtatgtgtgtaagctgcaggaaatccaagaaagaaagaagtttgagtttgtggaacctatgctgtcattttttcaggggatgtttaccttctatcatcagggccatgaacttgccaaagacttcaatcactacaaaatggaactacagatcaacattcagaatacacggaatcgatttgaaggaacaaggtcagaagtggaagagctcatgaacaaaatcagacagaatcccaaggaccacaaacgagcaagtcagtttacagccgaaggctacctgtatgtccaggaaaaaaggcctgctccgtttggttccagttgggtcaaacactattgcatgtatcgaaaagcagcaaagaagttcaacatgatcccatttgagcacagatctggagggaaacttggggacggagaggtgttctttttgaaagaatgtaccaagaggcatactgactccattgacagaaggttttgttttgacatagaagctgctgatcggcctggcgtttccttgaccatgcaggcattttccgaagaggaaaggaagcagtggttggaagctctgggtggaaagg

SEQ ID NO: 501 - DNA, 687 bp, Homo sapiens; identical to SEQ ID NO: 496
  misc_feature (1)...(687): n = a,t,c or g

SEQ ID NO: 502 - DNA, 370 bp, Homo sapiens
tttcgtcacaggtcttgggggatagaggtgaccgggccagtgccctggggctctggccatgaagtctcggcagaaaggaaagaagaagggcagcgcaaaggagcgggtttttgggtgcgacttgcaggagcacctgcagcactcaggccaggaggtgccccaggtgctaaagagctgtgcagaatttgtggaggagtatggagtggtggatgggatctaccgcctctcaggggtctcctccaacatccagaagcttcggcaggaatttgagtcagagcggaagccagacctgcgtcgggatgtttacctccaagacattcactgcgtctcctccctgtgcaaggcctatttcagagaactgccggatccc

SEQ ID NO: 503 - DNA, 403 bp, Homo sapiens
tgaattcccccgtctccctgaccccaatgtggtcttccccccaaccccaaggcgctggaacactcagcaggactctaccttggagagacccaagactctggagtttctgcctcggccgcgtccttctgccaaccggcaacggctggacccttggtggtttgtgtcccccagccatgcccgcagcacctccccagccaacagctccagcacagagacgcccagcaacctggactcctgctttgctagcagtagcagcactgtagaggagcggcctggacttccagccctgctcccgttccaggcagggccgctgcccccgactgagcggacgctcctggacctggatgcagaggggcagagtcaggacagcaccgtgccgctgtgcagagcggaactgaacaca

SEQ ID NO: 504 - DNA, 583 bp, Homo sapiens
atgtctgcacttaatgagcgtctaaagaatcctgaaaattcagaacccaagtcttcccagtactatcttagtttccgcaccgcagttcctcggtgtccacttcaggcttccggactggaaggacagccgggaataaaacgtgccggcgaggctcaggagtcattggccacagagacccagcccgagtttcccatcgcactgagcactgagatcctgctggaagctctgccgcagcatgagctccgcagccgggttctgcgcctcacgccccgggctgctgttcctggggttgctgctcctgccacttgtggtcgccttcgccagcgggaaaccttgcataccctggaggcccaccccatagcttctgcactggcagactcatgcctgactggtgaagagatccagcagagcagcccctacagccacacaccagcctgcattctccctccccatactgaagcttcccccacatccattgctactccccacattgctttgctggtgtctgcctgcaggtggcagattttgctttccttgtcctgccagcgcacaggaatacatgcggtcctcacccctcccaatg

SEQ ID NO: 505 - DNA, 633 bp, Homo sapiens
tgccgaacagccaggctgcccaattgcaactgtagaccaatgaactaatccatcgcccgcagcccgactctcagcagcggttcgtcccggtgcccacccccgcgaagcggagcgcccgggcacctagcctccctgccggccacctagcctccctgccggccacgatgccgaacgtgctgctgccgcccaaggagagcaacctcttcaaacgcatcttgaaatgttatgaacagaagcagtacaaaaatggcctcaagttttgcaagatgattctgtcgaacccaaaatttgctgaacatggagagactttggctatgaaaggattaacactgaactgtttaggaaaaaaagaagaagcttatgagtttgttcgtaaaggacttcgtaatgatgtcaagagtcatgtctgttggcatgtatatggactcttgcagcgttctgataaaaaatatgatgaagctataaaatgttaccgaaatgccctcaaattagataaagataacctgcaaattttgagggatctctcactgttgcagatccaaatgagagaccttgaaggttaccgagagacaagataccagcttcttcagttgcgccccacacagcgtgcctcctggattggatatgctattg

SEQ ID NO: 506 - DNA, 1783 bp, Homo sapiens
ttttttttttttaaacatttaaaaattttatttagagacaagtctaccatgtcaccgtaagtttatgctactgctggaaatgaacaaatgtagccccataaggaagaaaagttgagagatgccatatgtttaaagacatggtagtcagacttctttgtaatcacatttctatgataaatgcatagtataatttttgaaggtataaagacaatttctaaggatttatattctagttaatacctacaactctaaacattacttaatacctcatttaagctgatttctttttctctagtcactttgcaaatggaaatgtaagaattgaaatttgtggctctaccctcaagattctcaaattaaaacacagctaccatatacatggccagatcaaatgcttagcgatgtttgaagtgttcacaagagaactatgagcgtataaactgtatgatattctatgacacagtaagtgtgataaagttagtacaaagtatttaaagatatgtcagtcagctctttttatatagaaaaacaaaatcttttacatacggaatggaaattttgtagaacagaagttttttaaaatttatattaaacattgcttaactagtaaatcctgtcagtgtagaaataatttttttgtaattctcaaagaagaaaatagtatacgctttaattcatggttacgtagttggctggaaaaatgccagtttgacctcgaagttttccttcccaccaatcaaaatgtgaatctgtttttgatataactgtgattctgtctccagcttgaaaattcaaatccccaggctgctgtccttcaaatgaatacagcgctgtcacttctatgggttgattcaaattgccaactctctcatgatagctggaaagtccaggatagagcttatattcatttctgttactttgagagccagagttcagctggactggtgcagatgactgctgtggtcttgacaatggctttggaggtaattctttagcagaagacttcctctgctcccttgctgcttttcttgcattgattcgttgtccttcattttcatacttttcagtaaaggaatcaagaatttcataaagatcttcggcttgagcaggccgcggtgtatctccaaataaaatgtcataagctcggatatcttgacaataaaattttctattagtttctttcctttcaatcaaacagctcccttctaaagacacgcctgcaaagagtccccttgacttgcagtacgtgaagacggcagcggagcttctcagggccacgtttccttccaagttccttcccaagggcccaaccgccacagtcaagttccctccgagggtcagatttccgccttttgcaaaagcttctacagcacggtcataattcagaattatcaccaagtctgatacctcaattcctatttcaaatcctccaccaaggccagctatcccaatggctgagggtgcagaccattttccatctggaaggcgcgccactacaatcccgctgcctcctctggcagtcaccaggaacccggctttgatcacagacagaattgcaaggcctttagccttcgcaattacgtgagcaggaatgatcttatcaggtccatttctggaagttatttctgtgaattctcttaatattttggcagccttttttgcttctgatttcaaattggaaggtatagggttattcacgtcataggaccgcctccgcaggcgcactggagccgattgcgcaggcgtggctctcacaacgcgctgccctgttggcgttggtgcg

SEQ ID NO: 507 - DNA, 1564 bp, Homo sapiens
agtgtggtggaattcgtgaacttgaagcacttgcaactttgtaccagaaacaaaataaatatgaacaagctgaacattttaggaaaaaatcctttaaaattcatcagaaagctataaagaaaaaaggcaacttgtacggatttgcccttttacgtagacgggctttacagttagaagagcttacattaggtaaggacacacctgataatgctcggaccctcaatgaactgggtgttctctactatcttcaaaataacctggaaacagctgaccagtttctgaagcgttccttagaaatgagggagcgagttctaggaccagatcaccctgactgtgctcagtctttgaataatctggcagctctatgcaatgaaaagaaacagtatgataaagcagaagaactttatgaaagagctttagatattcggagacgtgcattagctcctgatcacccttctttggcatatacggtgaagcatcttgccatcttgtataagaaaatggggaaacttgacaaagctgtacctttgtatgaattggctgttgaaattcgacagaaatcttttggcccaaagcaccctagtgtagctactgccttggtgaacttagctgttctttatagccaaatgaaaaaacacgttgaagctttgccattatatgaaagagcattaaagatttatgaagatagcctaggtcggatgcatcctcgagttggagaaacactgaaaaatttagctgtgcttagctatgaaggaggagattttgaaaaagctgctgaattatacaaaagggcaatggaaataaaagaagcagaaacatcactcttgggtggaaaagctccttcacgccattcatcaagtggagacacgtttagcttaaaaacagctcattctcctaatgttttccttcagcaaggacaaaggtaatagcagcagttagaattctttgcaaatgtaccttaagacaaaataattaaacatttggaacatttgaatttgaaactttaaaaaaatgttgtacgaaattttactacgtgtgatttaactgctatttgtatgaagttgtattggattacattaagttggaattgtgattatgtctgttttagttgtttaaaagaattttcctattatatggtatccaaggatgtagacacattagaattataagaagacatgaggagcaaatcatgaagagcggattggtctttgttcaacaagagctggcagagtagttaagacaaggagttcaaaaattccatgaatcttggccaggcatggtggctcatgcctgtaatcccaccactttgggagggtgatgcaggaggatcacttgaggccaggagttggagaccagcctggccaacatggtgaaaccctgtctctactaaaaatacaaaaaaaaattagctggacctggtggcgcatgcctgtaatcctagctactcaggaggctgaggcatgagaatcgcttgaactcagcaagtggaggttgctatgagctgagattgtgccagttcattccaccctgggcaacagggtgagactctgtctcaaaaaaaaaa

SEQ ID NO: 508 - DNA, 1310 bp, Homo sapiens
cagctactcaggaggctgaggcttgaacctgggagagggaggttgcagtgagccaggatcatgccacttgcattctagcctggatgacagtgagactgtgtctcaaaaaaaaaatcctgggatttaatattcatttttggctattcttactttcttactcaagattttgaggcctcaaataattgttatagttgttcaaaactgtattaatctaaaggacattttatcaagaaaattttaattcctttctctgttcaggaaacgattatatatggaagtatttgaatatactcgccctatgatgcatcctgaacctggaaaattctaccagattaatccagaagagtatgggcatccaaatacctggaaagagagtttccagcagttgtataaaggtgcacatgtaaagccaggatttgctgaacatttctacagtaaccctgcaagatataaaggaagagaaaatatgttgtattatgatactattgaagatgcccttggtggggtacaagaggctcattttgatggacttatctttgttcattctggaatatatactgatgaatggatatatattgaatctccaatcaccatgattggtgcagcacctgggaaagtggcagacaaagttataattgaaaacactagagattcaaccttcgtttttatggaaggctctgaagatgcttatgttggatatatgacaataaggtttaaccctgatgacaaatctgcacaacaccacaatgcacaccactgcttagagattacagtaaattgtagccctattattgatcactgtatcatccgaagtacatgtacagttggttctgcagtatgtgttagtggtcaaggagcatgtcccaccatcaagcactgtaacatcagtgactgtgaaaaatgttgggactatatataacagatcatgcacacgggaactatactgacggataactgaaatttccaataatgccgttagctgggatttgggttaaaaatcatggaaacccaattattagacggaatcatattcatcatggacgtgatgttggtgtgttcacatttgatcatggcatgggttactttgaaagttgcaatatacacagaaataggatagcaggctttgaagtaaaagcctatgctaaccctacagtggttcgatgtgaaattcaccatgggcagactggaggaatatatgtccatgaaaaaggaagaggacaattcatagagaataaaatctatgcaaacaactttgcaggtgtatggattacctcaaatagtgacccaacaataaggggaaattctatatt

SEQ ID NO: 509 - DNA, 740 bp, Homo sapiens
acatgggtcgctggctcgggctgctgctggtggagatgggctccagagtcactccggaggcgctgcactatgactacgtggatgtggagaccttaaccagcatcgtcagtgctgggcgcaactccttcctatatgcaagatcctgccagaatcagtggcctgagccccgagtctatgatgatgttccttatgaaaagatgcaggacgaggagcccgagcgccccacaggggcccaggtgaagcgtcacgcctcctcctgcagtgagaagtcccatcgtgtggacccgcaggtcaaagtcaaacgccacgcctccagtgccaatcaatacaagtatggcaagaaccgagccgaggaggatgcccggaggtacttggtagaaaaagagaagctggagaaagagaaagagacgattcggacagagctgatagcactgagacaggagaagagggaactgaaggaagccattcggagcagcccaggagcaaaattaaaggctctggaagaagccgtggccaccctggaagctcagtgtcgggcaaaggaggagcgccggattgacctggagctgaagctggtggctgtgaaggagcgcttgcagcagtccctggcaggagggccagccctggggctctccgtgagcagcaagcccaagagtggggaaactgcaaataaaccccagaacagcgttccagagcaacctctccctgtcaactgtgtctctgagctgaggaagaggagc

SEQ ID NO: 510 - DNA, 726 bp, Homo sapiens
cccaaacaaagatggcgcgggaagcgtctgtgagggcagactgatccgagcacccaaaccctcggcggacagcggagccagtggtagccgcacggccctaaaaccatggaggagggcggcagcactggcagtgctggcagtgacagcagcaccagcgggagtggcggggcgcagcaaagggagctggagcgcatggctgaggtcttggtcaccggggaacagctacggctcaggctgcacgaagaaaaggttattaaagatagacgtcatcatctcaagacctacccaaactgttttgtcgcaaaagaactgattgactggctgattgaacacaaagaggcttctgacagagagacggcaattaaactcatgcagaaattagcagaccggggcattattcaccatgtgtgtgatgagcataaggaattcaaggatgtcaaactcttctaccgctttagaaaggatgacggcaccttcccattggataatgaagtgaaggcctttatgagaggacagaggctatatgaaaagtatgttccgcatgaaatcccccctgtaatcttgacttatagaaagaagcacaactgtgccagtctcattatgttgatttcagcggggcttttctatgtgggctggttacataactgttcttttccatatgagaaaactatcaagcatttgctgtctctttgccagaaaataagtcaatttcataagggttttaaa

SEQ ID NO: 511 - DNA, 1345 bp, Homo sapiens
ttttttttttttcacaatgattgtactttattgatgtgttacaggaggtaaggactttctgcttaaaatatttaaaatttacatgtgcacacaaacaaacacaggttcccccacccatggggaagggcgagatgactctgaataaaggatggaggagaagaagagggtgtagacggagggcccttgacccctacaggggcagcaggataaggaatagagtggggcagaaggtgggttattaagaagcatcttgcttactgacatgaagccacgtgcccagcgagagcacagatgaggcctcattggcgtagaggaggcccttggagggcaggcacacggtgcccaactagccagccaaggccaacgtcccaggggtagggcggaagtggggtggcgtgcacagggcacccagcccaggcctctgctgcccccacctccctccccaccctttgagagaaaagacggtttgggcctcagccacggaccgacgccgttaccggcagcgtctcctgaaactacagagatacaatgtgtatcaacagggtgatcgcttctgacccactgaggcagacagctagaggtgctgcatgggccagaaccaatcctacagtatctttggtttgtgggtttccttcccgacttgaatcctccctctgtccagcctctggggtgggcctcagggctgggaatgggctgctcaatggcccaaagcccagcctgacggcccttggaggctgggggtgctgcccttgccagccacaggcagcttactcactggggtgctgggacttgtaggagaggatctcggcagccagctgctgggggtccaggagctgtgggaagcgccccatcacagcctccaccaggtgcgggggaaacacaccacacagcttagtatacacgctggcctgctccttggccaggctgcctgccctgccccacgggctcctgccagcccctgggctctgcactgggggctcctgaaggactgatgtgggtgggggcagtgggtatggttcagaccagtactctcgaggtggaaaggcagggggcgcgggtgggtagtcggcagggacactgaagtggccagcacccatggcccggccaaaggcagagaaggctgcggtggctgggagctcagatccatagggactgtagcccgtgtaaggggctcggggtgggcccggctcaccagggcctcctcctcgaaccccccaaagttccgacatctggctctccagggagccaatgcccgagtccaggcaatcctgggagacgtacgggagtgagtccagcgtctgtgggagccagtctgtgggcccgaattccaccgcactgtactagg

SEQ ID NO: 512 - DNA, 4696 bp, Homo sapiens
ccgagccctgaggcaggcggcggcggaggagccctcaaggcgagcagcgcgcgcgcggctgccgcgggactgctgcgggaggcgggcagcgggggccgcgagcgggcggactggcggcggcggcagctgcgcaaagtgcggagtgtggagctggaccagctgcctgagcagccgctcttccttgccgcctcaccgccggcctcctcgacttccccgtcgccggagcccgcggacgcagcggggagtgggaccggcttccagcctgtggcggtgccgccgccccacggagccgccagccggcgcggcgcccaccttaccgagtcggtggcggcgccggacagcggcgcctcgagtcccgcagcggccgagcccggggagaagcgggcgcccgccgccgagccgtctcctgcagcggcccccgccggtcgtgagatggagaataaagaaactctcaaagggttgcacaagatggatgatcgtccagaggaacgaatgatcagggagaaactgaaggcaacctgtatgccagcctggaagcacgaatggttggaaaggagaaataggcgagggcctgtggtggtaaaaccaatcccagttaaaggagatggatctgaaatgaatcacttagcagctgagtctccaggagaggtccaggcaagtgcggcttcaccagcttccaaaggccgacgcagtccttctcctggcaactccccatcaggtcgcacagtgaaatcagaatctccaggagtaaggagaaaaagagtttccccagtgccttttcagagtggcagaatcacaccaccccgaagagccccttcaccagatggcttctcaccatatagccctgaggaaacaaaccgccgtgttaacaaagtgatgcgggccagactgtacttactgcagcagatagggcctaactctttcctgattggaggagacagcccagacaataaataccgggtgtttattgggcctcagaactgcagctgtgcacatggaacattctgtattcatctgctatttgtgatgctccgggtgtttcaactagaaccttcagacccaatgttatggagaaaaactttaaagaattttgaggttgagagtttgttccagaaatatcacagtaggcgtagctcaaggatcaaagctccatctcgtaacaccatccagaagtttgtttcacgcatgtcaaattctcatacattgtcatcatctagtacttctacatctagttcagaaaacagcataaaggatgaagaggaacagatgtgtcctatttgcttgttgggcatgcttgatgaagaaagtcttacagtgtgtgaagacggctgcaggaacaagctgcaccaccactgcatgtcaatttgggcagaagagtgtagaagaaatagagaacctttaatatgtcccctttgtagatctaagtggagatctcatgatttctacagccacgagttgtcaagtcctgtggattccccttcttccctcagagctgcacagcagcaaaccgtacagcagcagcctttggctggatcacgaaggaatcaagagagcaattttaaccttactcattatggaactcagcaaatccctcctgcttacaaagatttagctgagccatggattcaggtgtttggaatggaactcgttggctgcttattttctagaaactggaatgtgagagagatggccctcaggcgtctttcccatgatgtcagtggggccctgctgttggcaaatggggagagcactggaaattctgggggcagcagtggaagcagcccgagtgggggagccaccagggggttttcccagaccagtatctcaggagatgtggtggaggcatgctgcagcgttctgtcaatggtctgtgctgaccctgtctacaaagtgtacgttgctgctttaaaaacattgagagccatgctggtatatactccttgccacagtttagcggaaagaatcaaacttcagagacttctccagccagttgtagacaccatcctagtcaaatgtgcagatgccaatagccgcacaagtcagctgtccatatcaacactgttggaactgtgcaaaggccaagcaggaaagttggcagttggcagagaaatactaaaagctggatccattggtattggtggtgttgattatgtcttaaattgtattcttggaaaccaaactgaatcaaacaattggcaagaacttcttggccgcctttgtcttatagatagactgttgttggaatttcctgctgaattttatcctcatattgtcagtactgatgtttcacaagctgagcctgttgaaatcaggtataagaagctgctgtccctcttaacctttgctttgcagtccattgataattcccactcaatggttggcaaactttccagaaggatctacttgagttctgcaagaatggttactacagtaccccatgtgttttcaaaactgttagaaatgctgagtgtttccagtgtttccactcacttcaccaggatgcgtcgccgtttgatggcttatgcagatgaggtggaaattgccgaagccatccagttgggcgtagaagacactttacaacgacaacaacacaacagcttttgcaggcatctgttcccaacaactatctggaaaccacagagaacagttccccttgagtgcacagtccatttagagaaaactggaaaaggattatgtgctacaaaattgagtgccagttcagaggacatttctgagagactggccaggatttcagtaggaccttctagttcaacaacaacaacaacaacaacaacagagcaaccaaagccaatggttcaaacaaaaggcagaccccacagtcagtgtttgaactcctctcctttatctcatcattcccaattaatgtttccagccttgtcaaccccttcttcttctaccccatctgtaccagctggcactgcaacagatgtctctaagcatagacttcagggattcattccctgcagaataccttctgcatctcctcaaacacagcgcaagttttctctacaattccacagaaactgtcctgaaaacaaagactcagataaactttccccagtctttactcagtcaagacccttgccctccagtaacatacacaggccaaagccatctcgacctaccccaggtaatacaagtaaacagggagatccctcaaaaaatagcatgacacttgatctgaacagtagttccaaatgtgatgacagctttggctgtagcagcaatagtagtaatgctgttatacccagtgacgagacagtgttcaccccagtagaggagaaatgcagattagatgtcaatacagagctcaactccagtattgaggaccttcttgaagcatctatgccttcaagtgatacaacagtaacttttaagtcagaagttgctgtcctgtctcctgaaaaggctgaaaatgatgatacctacaaagatgatgtgaatcataatcaaaagtgcaaagagaagatggaagctgaagaagaagaagctttagcaattgccatggcaatgtcagcgtctcaggtagccctccccatagttcctcagctgcaggttgaaaatggagaagatatcatcattattcaacaggatacaccagagactctaccaggacataccaaagcaaaacaaccgtatagagaagacactgaatggctgaaaggtcaacagataggccttggagcattttcttcttgttatcaggctcaagatgtgggaactggaactttaatggctgttaaacaggggacttatgtcagaaacacatcttctgagcaagaagaagtagtagaagcactaagagaagagataagaatgatgagccatctgaatcatccaaacatcattaggatgttgggagccacgtgtgagaagagcaattacaatctcttcattgaatggatggcagggggatcggtggctcatttgctgagtaaatatggagccttcaaagaatcagtagttattaactacactgaacagttactccgtggcctttcgtatctccatgaaaaccaaatcattcacagagatgtcaaaggtgccaatttgctaattgacagcactggtcagagactaagaattgcagattttggagctgcagccaggttggcatcaaaaggaactggtgcaggagagtttcagggacaattactggggacaattgcatttatggcacctgaggtactaagaggtcaacagtatggaaggagctgtgatgtatggagtgttggctgtgctattatagaaatggcttgtgcaaaaccaccatggaatgcagaaaaacactccaatcatcttgctttgatatttaagattgctagtgcaactactgctccatcgatcccttcacatttgtctcctggtttacgaagatgtggctcttcgttgtttaagaacttcaacctcaggacagacctccatcaagagagctactgaagcatccagtctttcgtactacatggtagccaattatgcagatcaactacagtagaaacaggatgctcaacaagagaaaaaaaacttgtggggaaccacattgatatctacggccatgatgccactgaacagctatgaacgaggccagtggggaacccttacctaagtatgtgattgacaaatcatgatctgtacctaagctcagtatgcaaaagcccaaactagtgcagaaact

SEQ ID NO: 513 - DNA, 2015 bp, Homo sapiens
tttcgtccacgtcctgctccccctggtgaagaagctgccctgggcttgtcgtcctagggtctccagacatgtctgaggtgaagagccggaagaagtcggggcccaagggagcccctgctgcggagcccgggaagcggagcgagggcgggaagacccccgtggcccggagcagcggaggcgggggctgggcagacccccgaacgtgcctgagcctgctgtcgctggggacgtgcctgggcctggcctggtttgtatttcagcagtcagaaaaatttgcaaaggtggaaaaccaataccagttactgaaactagaaaccaatgaattccaacaacttcaaagtaaaatcagtttaatttcagaaaagcttgagtctactgaaagcatcctgcaggaagctacatcatccatgtctttgatgacccagtttgagcaggaagtatccaacctccaagatatcatgcatgacattcaaaataatgaagaggtgctcactcaaaggatgcaaagccttaatgagaaatttcagaatattacggatttctggaagagaagcctagaagaaatgaacattaatacagacattttcaaatcagaagcaaaacatatacattctcaagtaactgtccaaattaactcagctgagcaggaaataaaattgctcactgaacggctaaaagatttggaagatagcacactaagaaatattagaacagtaaaaagacaagaagaagaagatctcctgcgagtagaggagcagctaggctctgatacaaaggcaattgaaaagttagaagaggaacagcatgccctctttgccagagatgaagatctgactaataaactttccgactacgaacccaaagttgaagaatgcaagacacatttgccaacaattgaaagtgctattcactctgttctcagagtctctcaggatctgatagaaacagaaaagaaaatggaagacttgactatgcagatgtttaatatggaagatgatatgctgaaagcagtgtctgaaataatggagatgcagaaaacccttgaaggattttttttatgataatagcatattaaagatgcaaaatgaactggatattctaaaagaaaaagttcatgattttatagcatactcaagtacaggagaaaagggaactttaaaagaatataatatagaaaataaaggaattggtggtgatttttaaattcatgacatttattctgatgaaccatatcattatacataaattgattagtccattgattttgagttactttgatacgcctcatcttatcctacattattggaaaataaatgagatgtccacacaaatggattatccacataatcaaagcttatctttttaagcactaaaacttacttcattgtaactatttgaaatagaaatagttctttaaaaatatttctctacttttaaaacaagatacttaatatttttaatgttttttaaagcattaatggacatcatcattaatttcacctattatattgtacccacatatattgatgtctccaggggctaataaagagtatttaccacttcactaaatgaccccaatttgccattttcaaacctatgtctcataccttttctgtcacctgaacttactgtcaggttggttggtaatgtgcctgcctcagccagttcactttcttaggtaattcactgcaggttaagaatccacacaaccaagttcatgggaattttgtgtaaaataaaagataacatgcctgagggagagcctggtgcctttgctatgaattaatatgcactttctgaaaactctaaagcctgggaaacattttagtttttgttaaggttctaaactgtgttacagatacttgtaagacttttaaaatcagagtaagtatgttcttacataaggcctttcttaggaattatgtgtatataaatctttgaaatatctttatatacctgagttttaggttccaactgtgttagacatgagtttgctagatccatggtctctagat

SEQ ID NO: 514 - DNA, 2015 bp, Homo sapiens; identical to SEQ ID NO: 513

SEQ ID NO: 515 - DNA, 1279 bp, Homo sapiens
aatagtcgaccgttgtggaattccactgaaagaagctgagagcctacaagttgcagtgaaggcttcacagatgggcgccgtgagtcaatcatgtgaggacagttgtggagactctgtcttggcggacacactcagttctcatgatgtaccaggatcaccgactgcctcattagtcacaggagggagagaaggaagaggctgttcggatgtggatcccgggatccagggtgtggtaaccgacttggccgtctctgatgcaggggagaaggtggaatgtagaaattttccaggttcttcacaatcagagattatacaagccatacagaatttaacccgtctcttatacagccttcaggccgccttgaccattcaggacagccacattgagatccacaggctggttctccagcagcaggagggcctgtctctcggccactctatcctccgaggcggccccttgcaggaccagaagtctcgcgacgcggacaggcagcatgaggagctggccaatgtgcaccagcttcagcaccagctccagcaggagcagcggcgctggctgcgcaggtgtgagcagcagcagcgggcgcaggcgaccagggagagctggctgcaggagcgggagcgggagtgccagtcgcaggaggagctgctgctgcggagccggggcgagctggacctccagctccaggagtaccagcacagcctggagcggctgagggagggccagcgcctggtggagagggagcaggcgaggatgcgggcccagcagagcctgctgggccactggaagcacggccggcagaggagcctgcccgcggtgctccttccgggtggccccgaggtaatggaacttaatcgatctgagagtttatgtcatgaaaactcattcttcatcaatgaagctttagtacaaatgtcatttaacactttcaacaaactgaatccatcagttatccatcaggatgccacttaccctacaactcaatctcattctgacttggtgaggactagtgaacatcaagtagacctcaaggtggacccttctcagccttcgaatgtcagtcacaaactgtggacagccgctggttccggccatcagatacttcctttccatgaaagcagcaaggactcttgtaaaaatggtaattaacactttaaacatcatctgtatagtttgaacaagaagttgtccctctgaatggttggctcttgtgtagagtgaatcaaagtcctccctagcatgggaataaatcggtactgatgagctggaaaaaaaaaa

SEQ ID NO: 516 - DNA, 1291 bp, Homo sapiens
atgccattttatatcagcgacttgagcatctgtggagatcggattctaagggccctatgcccccaggaccttccaacatatagcttgcatagtcgtggaaaaatgcgtgcttcttgttctcgtaaattcctggataataattcatctaggctggtatcctgtaacatgggtgctttgatttccatttgggggaccaccactcccccattgcatgcaacaatattggacagtcaaccaactgtccaccctcctctggccaaagactgcctgccctgtggactgcaagcttcagcatcagacctgagggcaagagccttacagagactgtgtcagcagctcccatgggtagggtcccagccacataccaggagcccgtccccacagaggggtgggaagacgggcctcttcgccggcctggcctcctctgtgtccatgcggcccgcatccccgccctctcctgctgcggacagctgttcagcctgtcgtttcttcgcccgtcggccacccttgcgggtgacctgggtaaagccctcctctgccctggcgctctgcgtttccatttcggattccatccccggaaatcttaaagcgctgccggctgaaacacgtgcgcagctgcaccacgcagaagccagcctcagccaaccacccctgcagctccgcccctttcctaaaacgtcacaggccggggacctgcaggatttggggccgtatgtatgtgtgcgaaaggcagtgggtaaaggcgataaacaaattcgtgctgttgtgaaggaacattctgtgcgatcgcaggagcgcatctggcattatccggggataactacagccaacatgccagggcatctggggcagaatacggaaagcgggagggacaaattgccaatgtttggagtctggtttccaggttgccgtttttgggggctctgggtgtggcggttgccgtagctgaaattggctgcaccatgtcggccttcgagaagcctcagatcatcgcccatatccagaagggcttcaactacacggtgtttgactgtaagtgggtgccctgcagcgccaaatttgtgaccatgggcaacttcgcacggggcaccggcgtcattcagctgtacgagatccagcacggggacctgaagctgcttcgggaggtgggtgccgggtcgaggatccggactgccgttgggggcgagtgcggatcctggggtctgcattcctctttgccagagccttcgcccagcgtcccccaaagcatggcttgagccgcgcgagaccagagaagctgaccgccgactga

SEQ ID NO: 517 - DNA, 1283 bp, Homo sapiens
aacgagtttacccgccgcaagcatcttgaactgacagccacgatgcaggttgaagaagccaccggtcaggctgcgggccgtcgtcggggaaacgtggtgcgaagggtgtttggccgcatccggcgctttttcagtcgcaggcggaatgagcccaccttgccccgggagttcactcgccgtgggcgtcgaggtgcagtgtctgtggatagtctggctgagctggaagacggagccctgctgctgcagaccctgcagctttcaaaaatttcctttccaattggccaacgacttctgggatccaaaaggaagatgagtctcaatccgattgcgaaacaaatcccccaggttgttgaggcttgctgccaattcattgaaaaacatggcttaagcgcagtggggatttttacccttgaatactccgtgcagcgagtgcgtcagctccgtgaagaatttgatcaaggtctggatgtagtgctggatgacaatcagaatgtgcatgatgtggctgcactcctcaaggagtttttccgtgacatgaaggattctctgctgccagatgatctgtacatgtcattcctcctgacagcaactttaaagccccaggatcagctttctgccctgcagttgctggtctacctgatgccaccctgccacagtgataccctggagcgtctgctgaaggccctgcataaaatcactgagaactgcgaggactcaattggcattgatggacagttggtcccaggcaaccgtatgacttccactaacttggccttggtgtttggatctgctctcctgaaaaaaggaaagtttggcaagagagagtccaggaaaacaaagctggggattgatcactatgttgcttctgtcaatgtggtccgtgccatgattgataactgggatgtcctcttccaggtgcctccccatattcagaggcaggttgctaagcgcgtgtggaagtccagcccggaagcacttgattttatcagacgcaggaacttgaggaagatccagagtgcacgcataaagatggaagaggatgcactactttctgatccagtggaaacctctgctgaagcccgggctgctgtccttgctcaaagcaagccttctgatgaaggttcctctgaggagccagctgtgccttccggcactgcccgttcccatgacgatgaggaaggagcgggtaaccctcccattccggagcaagaccgcccattgctccgtgtgccccgggagaaggaggccaaaactggcgtcagctacttctttccttagatgtt

SEQ ID NO: 518 - DNA, 321 bp, Homo sapiens
acagaaacgagggaaaacactccctgatttttaatctgacttcgggtaacagctcaatgggcgtcacacacacttccagaccctgtggtgggaaaccctgggagcgggtggaaggagaaggacagagactcagaatgggggtggagggacctgaaatccaagacctgggttgaggtggaggcggaagggggcctgtcaggggatacattccaatggctcccacaggggagcagccagaggcctgggctccctctggtgaaccagggggcaggggtgcaggagactaaaggggcaggccctctttgttaccctcccagccac

SEQ ID NO: 519 - DNA, 825 bp, Homo sapiens
tttcgtgcggggctgggggctcggcccgccttgccctgaggcgctgggtgccttccagttggctgcgaccagcggtgacttacaagttggctgctgtcgcctgcgcatcggcgggccgggaggctgagcagtactgttgagagcggtgtgaggtgcttggtagcgcgccgtagctgcttccacgtccttgcttcacctcaggtaaagagagaagtaatggaaggcctgtctgatgttgcttcttttgcaactaaacttaaaaacactctcatccagtaccatagcattgaagaagataagtggcgagttgctaaaaaaacgaaagatgtaactgtttggagaaaaccctcagaagaatttaatggatatctctacaaagcccaaggtgttatagatgaccttgtctatagtataatagaccatatacgcccagggccttgtcgtttggattgggacagcttgatgacttctttggatattctggagaactttgaagagaattgctgtgtgatgcgttacactactgctggtcagctttggaatataatttccccaagagaatttgttgatttctcctatactgtgggctataaagaagggcttttatcttgtggaataagtcttgactgggatgaaaagagaccagaatttgttcgaggatataaccatccctgtggttggttttgtgttccacttaaagacaacccaaaccagagtcttttgacaggatatattcagacagatctgcgtgggatgattcctcagtctgcggtagatacagccatggcaagcactttaaccaacttctatggtgatttacgaaaa

SEQ ID NO: 520 - DNA, 914 bp, Homo sapiens
cctttctagggaccagggaaggaaaccttggagagcgctctcatcgccctcgactcggaaaaacccaagaagcttcgcttccacccaaagcagctgtacttctccgccaggcaaggggagcttcagaaggtgctcctcatgctggtggacggaattgaccccaacttcaaaatggagcaccagaataagcgctctccactgcacgccgcggcagaggctggacacgtggacatctgccacatgctggttcaggcgggcgctaatattgacacctgctcagaagaccagaggaccccgttgatggaagcagccgaaaacaaccatctggaagcagtgaagtacctcatcaaggctggggccctggtggatcccaaggacgcagagggctctacgtgtttgcacctggctgccaagaaaggccactacgaagtggtccagtacctgctttcaaatggacagatggacgtcaactgtcaggatgacggaggctggacacccatgatctgggccacagagtacaagcacgtggacctcgtgaagctgctgctgtccaagggctctgacatcaacatccgagacaacgaggagaacatttgcctgcactgggcggcgttctccggctgcgtggacatagccgagatcctgctggctgccaagtgcgacctccacgccgtgaacatccacggagactcgccactgcacattgccgcccgggagaaccgctacgactgtgtcgtcctctttctttctcgggattcagatgtccccttaaagaacaaggaaggagagacgcccctgcagtgtgcgagcctcaactctcaggtgtggagcgctctgcagatgagcaaggctctgcaggactcggcccccgacaggcccagccccgtggagaggatagtgagcagggacatcgc

SEQ ID NO: 521 - DNA, 914 bp, Homo sapiens; identical to SEQ ID NO: 520

SEQ ID NO: 522 - DNA, 914 bp, Homo sapiens; identical to SEQ ID NO: 520

SEQ ID NO: 523 - DNA, 1510 bp, Homo sapiens
atgtcccgggggcccgaggaggtgaaccggctcacggagagcacctaccggaatgttatggaacagttcaatcctgggctgcgaaatttaataaacctggggaaaaattatgagaaagctgtaaacgctatgatcctggcaggaaaagcctactacgatggagtggccaagatcggtgagattgccactgggtcccccgtgtcaacttgaactgggacatgtcctcatagagatttcaagtacccacaagaaacttcaacgagagtctttgatggaaaatttttaaaaaattccacaaagagattatccatgagctggagaagaagatagaacttggacgtgaaatatatgaacgcaactctaaaaagataccaaacagaacacaagaataaattagagtctttggagaaatcccaagctgagttgaagaagatcagaaggaaaagccaaggaagccgaaacgcactcaaatatgaacacaaagaaattgagtatgtggagaccgttacttctcgtcagagtgaaatccagaaattcattgcagatggttgcaaagaggctctgcttgaagagaagaggcgcttctgctttctggttgataagcactgtggctttgcaaaccacatacattattatcacttacagtctgcagaactactgaattccaagctgcctcggtggcaggagacctgtgttgatgccatcaaagtgccagagaaaatcatgaatatgatcgaagaaataaagaccccagcctctacccccgtgtctggaactcctcaggcttcacccatgatcgagagaagcaatgtggttaggaaagattacgacaccctttctaaatgctcaccaaagatgccccccgctccttcaggcagagcatataccagtcccttgatcgatatgtttaataacccagccacggctgccccgaattcacaaagggtaaataattcaacaggtacttccgaagatcccagtttacagcgatcagtttcggttgcaacgggactgaacatgatgaagaagcagaaagtgaagaccatcttcccgcacactgcgggctccaacaagaccttactcagctttgcacagggagatgtcatcacgctgctcatccccgaggagaaggatggctggctctatggagaacacgacgtgtccaaggcgaggggttggttcccgtcgtcgtacacgaagttgctggaagaaaatgagacagaagcagtgaccgtgcccacgccaagccccacaccagtgagaagcatcagcaccgtgaacttgtctgagaatagcagtgttgtcatccccccacccgactacttggaatgcttatccatgggggcagctgccgacaggagagcagattcggccaggacgacatccacctttaaggccccagcgtccaagcccgagaccgcggctcctaacgatgccaacgggactgcaaagccgccttttctcagcggagaaaacccctttgccactgtgaaactccgcccgactgtga

SEQ ID NO: 524 - DNA, 822 bp, Homo sapiens
aaacggagcttccacaaaccagatagaggttctccagcttttctttgattgtctctgctttagcgtctctaaatccggtcaccatgtcggaccccgaaggcgagaccttgcgaagcacctttccctcttatatggccgaaggcgagcggctctacctgtgcggggaattttctaaagccgcgcagagcttcagcaacgctctttaccttcaggatggagacaagaactgcctggttgctcgctcaaagtgcttcctgaagatgggagacttggagagatccctgaaggatgctgaggcttcgctccagagtgacccagctttctgtaaggggattttgcaaaaggctgagacactgtacaccatgggagactttgagtttgccttggtattctatcatcgaggctacaagctgaggcctgatcgggaattcagagttggcattcagaaagcccaggaagccatcaacaactcagtgggaagtccttcttccattaagctggagaacaaaggggacctctccttcttaagcaagcaggctgagaatataaaagcccagcagaagcctcagcccatgaaacacctcttacaccccaccaagggagagcccaagtggaaggcctcgctcaagagtgagaagactgtccgccagcttctgggggagctctacgtggacaaagagtatttggagaagctcctattggatgaaggtttcggacactttgttggcacggggccttgggggaaaggaaatctgggtggatgcttcatgcatgagctgaaggcagaacctgtcatataatattagctgacgtgtacctgtg

SEQ ID NO: 525 - DNA, 615 bp, Homo sapiens
caacgatctggcgtccgggctctacgcttcagtgtgcaagcgtgccagtgggcccccaggcaatgagcacctctatgagaacctgtgtgtgctggaggccagcccgacgctgcacggtggggaacctgagccgcacgagggccccggcagccgcagccccacaaccagtcccatctaccacaacggccaggacttgagctggcccggcccggccaacgacagtaccctggaggcccagtaccggcggctgctggagctggatcaggtggagggcacaggccgccctgaccctcaggcaggtttcaaggccaagctggtgaccctgctgagtcgtgagcggaggaagggcccagccccttgtgaccggccctgaacgcccagcagagtggtggccagaggggagaggtgctccccctgggacaggagggtgggctggtgggcaaacattgggcccatgcagacacacgcctgtgtccaccctggcctgcaggaacaaggcaggccgcctgtggaggacctcagccctgccctgccctcctcatgaatagtgtgcagactcacagataataaagctcagagcagctcccggcaggggcactcccggcaaaaaaaaaa

SEQ ID NO: 526 - DNA, 459 bp, Homo sapiens
tgcctaggacaccctcagtctcaactgcactctccccgagactttgcccatgactccctcattctagctgtcctttctctgatttccaggcctggcccgagccaagtcaatcccaacaaagacatactccaatgaggtggtgacactgtggtaccggccccctgacatcctgcttgggtccacggactactccactcagattgacatgtggtaaggacaggtggaagtgtggcaggggccatgtggtaaagggggtggcttggtcacaacagccacccagccagctgcctttctattcactgtgccctccctgcccaggggtgtgggctgcatcttctatgagatggccacaggccgtcccctctttccgggctccacggtggaagaacagctacacttcatcttccgtatcttaagtgaggaggcatgggccctatgcgctgtggagacacacagggt

SEQ ID NO: 527 - DNA, 1848 bp, Homo sapiens
ttttttttttttgtatctatgtaaatattttattctgcttccagatagaacattgaagtttacatgttattttaaagacaataaacagctaagctactgacataaaatatacaataaatttatgagatataaggtacagatgagaaaaatctgaaataagtttttaacttcatttagcctattaggaacatgaagatgtctggaattgatgctggccttggtctcaagtactttttcccatatgtattcgttttatccttccagaaagcatatcatattagagtgtctaagaaatcagtgaatcactaagttttccatcttaccgaagtacaaaacattatttcaaatctaggccttctgacagaatccaatatctatttttatacttacttttctttctactaagttctttcataaaattatgaatcagaaagcaagtacaagacatgcttatttcacacagaatatcaatgaagacttaagaagataaatagcaagtacttctaaaaaatcacaaattttgacatttggaacaatataattgccatactattatatcttttattaaaaaagaccttttccagcttgtttccagacttcttttactcctttaatgctttctttcttcacacacttccagtattcttgtatactctgatgttgtggtacccataaacctcgatgcattctgttttttaacaccccaagaaactcttcatgactaagacattcatcaccatccaaatcaaagatcttaaagacagtgtccaaaatattgtttgagagttcttgtcctgttgctactttcacagctctcttaaactccgctagtctgacaggacgatgagctaaactgaacatctgcatggcaatagcaaagtcttccaagtgggttgtaaaatggcaaaatgacttgaattcatccaaactaatgctctctcctgctgacaacttctctctcacatttttccaataaatatctttattttcagtgttagtgaaaaaaagtagccactctgcaaagtcttcttttctcatgaaactcaaacctttagaaaactgaaggaattccatttcttgaatctctgtttgtaaattttccataaatcttcgaaattctttataatgaagttttctttgtcctctttttccaaagaaacgcatctgaagagttgtgttaatttcaggttctttcactattgcttcctgatatccagtttcattagttttcactgtcatcaagtcatcttgtttacttatgatcttctgcagcttaaaaaattcccttttttcaatcatctcattaccatctgtatccagcattttaaaagcaacatgaaatccagaatggggtttagtgaggattgtaagcaagaaaagatactcggtatatgaaattagccctttatcgccaaggtctctgaaaaaagttgatccacagccagctgtttggatccctgacagtgtatcctcgatgtccttttttgtcagcttcttgactgaagttttacgttccatttgctcaaacatcactgagaagaggaagtctcgtggtgtcatataatattctccttcatgttcgagtgaagaaaactgcatgaagcgctgcttacgaagagacggtttcccaatatatattattccatgttcaacatttttctgtgcggagactgtaaaactgccatcccgcgccgcaacactgacgcggctgtggtgccaggccgctcctgctcctgccagggccgcgccggccactgccgctgccaaggggccgggactccgcacagcctgtcggctgacagcgagcccccgtcgcagttttccgccccaggccgccacccgcgcgca

SEQ ID NO: 528 - DNA, 368 bp, Homo sapiens
cactgatccagcacctggtgccctcagccgactactaccccgagaaagcctacatggtcaccttcgtgctgagctctggcctcttcatcgagccccgggagctcctggcccgggtctgccacctgtgcatcgagcagcagcagctggacaagccggggctggacaaggcccgggtccggaagttcggccccaaactgctgcagctgttggccgagtggaccgagaccttcccaagggacttccaggaggagtcgactatcgggcaccttaaggacgtcgtgggccgcatcgccccctgtgacgaggcataccggaagaggatgcatcagctcctacaggctctgcaccagaagctggcggctctgcgc

SEQ ID NO: 529 - DNA, 497 bp, Homo sapiens
cccttgatgaccatctagtcagtgcggtggaattcccatgacagacgtatctgactggtcatgtggtcagcaagcctcgcctttggtcaggccctggagggtacagctgacccatagggccacttccatggcactgggcaagtggctgtattggaaatgaagtcgttgcccccgatttctttggggccaggttgagctttcctgcccagagcacggaggctaaagggggtgggctttggactggattggggctgacctcagcctacacctgcaggaggaggtggagacagaggtggcctgggaggaatgtgggcacgtcctactgtcactgtgctacagctctcagcagggtggcttgctggtaggtgtgctgcgctgcgcccacctggcccccatggatgccaatggttactcggaccccttcgtgcgcctgtgagtgaactggggtaggcaggcgggaggtgaggataaggcggtgactcctcacctctccaggg

SEQ ID NO: 530 - DNA, 2033 bp, Homo sapiens
atggtgcacaaccagtatggcacctgctgtctcagttcaggtatgagagagtgtgggcacacctacacgagctggccacccaggtctctgtccctggaaagttcccaaattgccactaacagcattgctcagggtcaccaggggagaggggctccccaacagttggtggtcagcagattgtcagagggttttattaccaaagcagcaaacaacagtgcacaagttatagaggacatgaaggatacaaacgctagatgttgtttgctgatgcctcacatattcacccccaagtcacatccaaatcagcccacgtgggagaatggagccacactcaggtctcatggggagatctacatatcagccagaaatcctggaattcaagtagaaagcagtacctgggaattgggggttgcttctcttgaagagggtataaatgcattccacataaagaatatttatgtaaaggaagatgtgaacggatcctgggtggtccaagagcactatcacagtagcaaagacgtggaatcaacccaggtgcccatccacggtggattggataaagaaaatgtggtacctatgcacgacggaatactacgcagctgtaaaaatagaatgaaatcctgtcccctgttttttgcagcaacatggatgcagcagaaggccattatcctaagcaaattaatgcagaaacggaaaaccaaataccacatgttctttattacaccagatcagtcttctcagagaacttcctttgaagtcaatgggcattgtacctccctgagaggtgggtcaaaatatagatctggatctgttaaaaccctacgaaccatttacaacttttcctatcacacgaggtcagtgggcaggtacccatcctcatctgcagaggattgggggatgaagagagaaaagtcagccctgctaataactgacgacaccatttccaatgaggctgccctagttgatgatggttatatcattggagaaatgctgccaccttgtgggagatgtgaaaagaagtcccgagagcaaattgtgataccattcttcagtctcttaatcaaagatatttatttcctcaatgagggttgtgccaaccgccttcccaatggccatgtcaattttgagaaattttgggaactggccaaacaagtgagtgaatttatgacatggaaacaagtggagtgtccatttgagagggaccggaagatcttgcagtatctgctcacagtaccagtcttcagtgaagatgtaagtggcctgccagtgtgctggcgtatgtcggtgtgcccatctgccagcgtgctcccctcagtgtcctctcgacgaccagccgctcctcagactgcccctgccaaactccgcctcatcccgccagtctgtcctgcgtgctggcatctttcggtgtgccctgccggcgtgcccttctaccagtgtgctcccctcaatgtcctctcgacgactcgccacttgcgtcttcttcagcagatgtgttcctcaccacgtccagctacttgtgtgtctgtctgccggcggtctcgggtttttataggcccaagatgggggcgtgatcatggaggggctggcctttgttttctggcatctcgtaccacgaacactcatgaagaccctgcagtcattggagcacccgggtcagcaaagcacacaagctcactcaagaccagatggagaacttatttcctgcagctgacagatagactcagattttgtgagactgaaatgttcactgaagacacttgagaaagaatcctctaaaaatcccggctctgcacattattcatctcctggaatttccatgtgaatcacagctctgcacctggatggagttttcttttgtgtgtgtgtgttttttttaatttggttgaacatttgctgctaatgggacttgcccagctgagtgctggctctgaggaagcccacgtttcttttgttaacttaaatgaagaaaggagtggagggaggggatctaaaacccccccgtttagatcccaaaccttagctcaatcagtatt

SEQ ID NO: 531 - DNA, 3376 bp, Homo sapiens
ggccgccacccacccccagatggtgggtccggaggatgccggagcctgctcgggaagaaaccccaagttgctcccggtgcctgcgccggaccccgtgggccaggacaggaaggtaatccgggccacgggcggctttggcggaggcgtcggcgctgtggagccgccggaggaggctgacgaggaggaggagacgccgcctcggcagctccttcagcgttacctcgcggcggccggggagcagctggagccggggctctgctactgtccgctccccgctggccaggccggcgccccgccgccctcggcagccccacgatcggacgcctgcctgctgggctcgggctccaaacaccgcggcgcggaggtggctgatggccgcgcgccgcggcacgaaggcatgaccaacggcgactcgggttttctgccgggccgggactgtcgcgatctggaagaggctcgcgggctggcgcgcgccggcggccgggagtcgcgccgccgccgcccctacggccgccttcgcctggaggggcctggcgacgaggacgcggacggcgcgggaagcccgtccgattgggcctctccgcttgaggacccgctgcggagctgctgcctggtggccgcggacgcccaggagcccgagggcgcgggcagcgactcgggggacagccccgccagcagctgcagcagtagcgaggactcagagcagcggggagtcggcgccgggggtcccgaggagggcgcgccccctgccacctcggccgagaggactaatgggggtgcggagccgcgcctgggcttttctgacattcacttcaactctcgcaacacgttccaggtgagccgcggtcagagcgcccgcgatcacctgcccccggcggggccgccggtgcccttgcccgccgcggagcagggtcctgcgggggcttcggcccgggctcgacggagtggcggcttcgcggacttcttcaccagaaacctttttccaaaaaggacaaaaggacctcaaatcagttgtccatagtgctcctggttggaaattatttggtaaagtccctcctagagagaatcttcagaaaacatccaaaatcattcagcaggaatatgaagcacgaacggggaggacctgtaaaccaccacctcagtcttcaagacgcaagaattttgaatttgagccgctttctaccactgccttgattcttgaggatcgaccatcaaatcttcctgccaaatctgtggaagaagctttacgtcaccgacaagaatacgatgagatggtggctgaggctaaaaaacgagaaattaaggaagcacataaaagaaaaagaatcatgaaagaacgatttaagcaggaagaaaatattgcaagtgcaatggtaatttggatcaatgaaatactgcccaattgggaagtaatgcgtagtacaagaagagttcgagaattgtggtggcagggattgccccctagtgtccgtgggaaagtttggagtctagctgtaggaaatgaactaaatatcactcctgaactttatgaaatcttcctctcaagagcaaaagaacggtggaaaagtttcagtgaaacaagttcagagaatgatacagaaggtgtatctgttgctgatcgagaggccagtctggaattaattaagttggacatatcccgtacatttccatctctctacatctttcagaagggtggtccatatcatgatgtcttgcatagtattttaggggcatacacatgctacaggcctgatgttggttatgtccaagggatgtccttcattgcagcagtactcattctcaatttggaagaggcagatgcctttatcgcatttgccaatctcctgaataagccatgccagttggccttttttcgtgtggatcacagcatgatgttgaaatattttgcaacatttgaagtattctttgaagaaaatctttccaaattatttcttcacttcaaatcttacagtcttacaccagatatatacttgatagactggatcttcacactatatagcaaatcactaccacttgatctggcctgtcgagtctgggatgtattttgcagagatggggaagaatttttatttaggactggattaggaatcctccgattatatgaagatattctcctgcagatggactttattcatatagcacagtttctaactaaattgccagaagatatcacatcggaaaagctgttcagttgtattgcagccattcagatgcagaatagcaccaaaaaatggactcaggtctttgcatctgtaatgaaggatattaaagaaggagacaagaacagtagtcctgctttgaaaagctagtcttcaaaattgacagactaactgacatagaaaaagtggtttttggataaaggttttttgtttcctatgtaaaaggcgtggaagaaaatgttggagatacctaaaagaatcaagaggtggaaaactgctgattttacattttatggctgaagtaaatgaaataagtaacttattgacagtattaataaactattattttgtagggtagggtcattttttcaaagggaaaaggttttaagtggtgagtttatattccacaatttggagtaaacaaaatgcaataaatttttaaaatagctttgaagatacttcaaatttttacatcttttcttttgtaacagttaccacaaagatattctggaggctagagtaggattgttaaatactactgttaacctccaaagtactatagtacagacattgtttccagttctgaccttttgaagatattatagaccagtaatgaacagatttggttgtaaattatttaagtcactgaagatgtcatttatcttcattcacaagttggggcaaattcgagttacctaggaactggaaatgttggtgggagattgtttattgtttgtttagatgtttttccatagtatggtgtcccattggttttttaagggaaatttttggtcttcccttaagggaattcctatcactcagagaattttagccattctgggttctagtctaaccaaattattcatcctaataatttgacattaagaaaacctataaataactggtagaaggaaagtgctttgcacttcagtggattgaagacttgactttgagagtaagtccaaaaacatatatgatgtttctcagtgataagagtaaaaagtaatgaatcctgagagttcttaaacagcatgctacttggcaagacttcatattttttagttacaattcttccactgtttaactccagtttgaaatttgaaatctaatatgtagctaaatctgtgacttgtaaaactctatgcataatttttcctaatcagtggaaataagaataaaagaaaaaggtaaagtta

SEQ ID NO: 532 - DNA, 318 bp, Homo sapiens
  misc_feature (1)...(318): n = a,t,c or g
cagcaagggcggcggtggcggcggcggcanctgcagtgacatgtccagcatgaatcccgaatatgattatttattcaagttacttcttaggtttgcagatgatacatatacagaaagctacatcagcacaattggtgtggatttcaaaataagaactatagagttagacgggaaaacaatcaagcttcaaatatgggacacagcaggccaggnaagatttcgaacaatcacctccagttattacagaggagcccatggcatcatagttgtgtatgatgtgacagatcaggggtccttcaataatgttaaacagtggct

SEQ ID NO: 533 - DNA, 522 bp, Homo sapiens
tacgcgcagcttggcacgagggcaagtttggggcagtctgtacctgcatggagaaagccacaggccttaagctgtcagccaaggtcatcaagaaacagactcccaaagacaaggaaatggtgttgctggagattgaggtcatgaaccagctgaaccaccgcaatctgatccagctgtatgcagccatcgagactccgcatgagatcgtcctgttcatggagtacatcgagggcggagagctcttcgagaggattgtggatgaggactaccatctgaccgaggtggacaccatggtgtttgtcaggcagatctgtgacgggatcctcttcatgcacaagatgagggttttgcacctggacctcaagccagagaacatcctgtgtgtcaacaccaccgggcatttggtgaagatcattgactttggcctggcacggaggtataaccccaacgagaagctgaaggtgaactttgggaccccagagttcctgtcacctgaggtggtgaattatgaccaaatcttcg

SEQ ID NO: 534 - DNA, 500 bp, Homo sapiens
  misc_feature (1)...(500): n = a,t,c or g
gtggcggaattcaagagccgaccttctgagccctcaagaaagatcagaacagattcatgggtgatttagcctatctgtcccaggccagcgtggctgagtgtgctggctggaggcctctctctctgcttcgagggtagctgagatccaccccggaaaccggcaggatgaagggggcaagtgaggagaagctggcatctgtgtccaacctggtcactgtgtttgagaatagcaggaccccagaagcagcacccagaggccacaggctagaggacgtgcatcaccgccctgagtgcaggcctcccgagtccccaggaccacgggagaagacgaatgtcggggaggccgtggggtctgagcccaggacagtcagcaggaggtacctgaactccctgaagaacaagctgtccagcgaagcctggaggaaatcttgccagcctgtgaccctctcaagatcggngacgcacgtgcctgagggctgaggtagaggtgtggggtgctgg

SEQ ID NO: 535 - DNA, 416 bp, Homo sapiens
ggaggctggactgagccagtgtgcttgggaaagagactggcttttccctttcagagttgcccagggaaagcagctatgacatctacagagtgcccagcagtcagagcatggaggatcgtgggtacagccccgacacgcgtgtggtccgcttcctcaagggcaagagcatcgggctgcggctggcagggggcaatgacgtgggcatcttcgtgtccggggtgcaggcgggcagcccggccgacgggcagggcatccaggagggagatcagattctgcaggtgaatgacgtgccattccagaacctgacacgggaggaggcagtgcagttcctgctggggctgccaccaggcgaggagatggagctggtgacgcagaggaagcaggacattttctggaaaatggtgcagtcccgcgtg

SEQ ID NO: 536 - DNA, 2964 bp, Homo sapiens
gaaactcctaggcagcagaggcccacgactacttcctcctgagtgccgttcagtggcctgtgtccaggctctgaagggctccaagaagctggtgctgtctgtgtactcagcagggcgcatccctgggggctacgtcaccaaccacatctacacctgggtggacccgcagggccgcagcatctccccaccctcgggcctgccccagccccacggtggtgccctgaggcagcaggagggtgaccggaggagcaccctgcacctcctgcaaggaggggatgagaaaaaggtgaacctggtgctgggggacggccggtccctgggcctcacgatccgtgggggagctgagtacggccttggcatttacatcactggcgtggacccaggctctgaagcagaaggcagcgggctcaaggttggggaccagattctagaagtgaatgggcggagctttctcaacatcctacacgacgaggctgtcaggctgcttaagtcatctcggcacctcatcctgacagtgaaggacgtcgggaggctgccccatgcccgcaccactgtggacgagaccaagtggatcgccagttcccggatcagggagaccatggcgaactcggcagggtttcttggcgatctcacaacagaaggaataaacaagccaggattttacaagggcccagccggctcccaggtgaccctgagcagcctggggaaccagacacgagtgctgctggaggagcaggctcggcacctgctgaacgagcaggaacacgccaccatggcctactacctggatgagtaccgtggcggcagcgtctctgtggaggccctcgtcatggccctgttcaagctgctcaacacccacgccaagttctcactcctctctgaggtgagaggcaccatttccccgcaagacctagaacgcttcgaccacctggtgctgaggcgtgagattgagtccatgaaaggcgcggcagcccccaggccccggggctggggaacacctagttccatggtgttcctacagttgacacgggtttcattccacaggcagccacggcacctccaccaccgtcagctcggccaggaacactctggacctggaggaaactggcgaggctgtccagggcaatatcaacgccctcccagatgtgtccgtggatgatgtcagatccacctcccaggggctgtcaagcttcaagccactgcctcgcccaccacctctggcccaaggcaacgacctcccactaggccagccaaggaagctggggagagaggacctccagccaccttcctccatgccttcctgctcgggcactgtcttctcggctccacagaaccgcagcccgccagcgggcaccgcacccaccccagggacctcctctgcacaggacttgccctcttcccccatctatgcctccgtctcccctgccaaccccagctccaagaggccgctggacgcccatctggccctggtcaaccaacaccccatcggccccttcccacgggtccagtcacccccgcacctgaaaagcccctctgcaaaggccacagtggctgggggctgccttctgcccccatcaccctctggccacccagaccagacaggcacaaaccagcactttgtcatgggggaggtccaccgccccgacagcgagccagacgtcaatgaagtgagggcgctgccccagacgcgcacagcctctacgctctcccagctctcggacagcgggcagactctaagcgaggacagtggtgtggatgctggcgaggcagaggccagcgccccaggccgaggaaggcagtcggcgtccaccaagagcaggagtagcaaggagctgcctcggaaagagaggcccacagatggggccaacaaaccgcctggacttctggagcccacgtccactctggtccgtgtgaagaaaagtgcggccaccctgggcatcgccatcgagggtggcgccaacacccgccagcccctgcctaggattgtcactattcagagaggcggctcagctcacaactgtgggcagctcaaggtgggccacgtgattctggaagtgaatgggctgacgcttcggggcaaggagcaccgggaggccgcccgcattatcgccgaggccttcaagactaaggaccgtgactacattgactttctggtcactgagttcaatgtgatgctctagaggccaaggcctgagggcctcccaccactgcccagcccctggtcccagtccctttccaccgttggcttcatcaagctccttgcggggttggggctgcatggccagggtggcaggaagacatcccccctccatcccagcccactggaccagaactgggagaggaagagagcaggacaaggcagacagaaggtcaggtcaggaactggtgctgtactgggtacacagtaggcgcccaggacaagtgggttgcaagacaggaagaaaggaaaaggaagggcagagtgctggtttctccaggttgggttgggggcactgctgtcccccctccagctaggacccagcccatccccagatgcctgagcctttgtccaaagtgaggtcactcgagaattcatggacacggcccccagtcagggggcatcttgcaagacctttagtgccacaaataagcatcgagcacctccccattcacacccccattcctcctggctccttatcccccatggtgtttattatttatttccctccccatgcccctggggaccccaaggccccagcttccctctgcacccccagcctatcccagaggccttgcaggtgaccagcagtgtcattgtatttatatacagagcttatgactttaatttttcaataaagaaatctgaacaaggttagaaaaaaaaaaaaaagggggggccgttttaaagaaccaaatttaacgtccgggggctggcaagggaaaagtttttttatagggcccccaaaattaattccccgggcgggc

SEQ ID NO: 537 - DNA, 1878 bp, Homo sapiens
  misc_feature (1)...(1878): n = a,t,c or g
ttttttttttttgtgaacaatcaagctttatttttacaaaaatgaaaattgtagcatgtctcaacagccagcctgaggtagggctggctcagaactcactcagaactgctgggttccctttgctctttcttggtttcaaagcaaaaccaggccacagtgccccaggaatgaacccccagccccgagaggttggtcaagggtgaggtctggctggtgccaggaggctattggcagcctcacctttccttccaggaaggggcagaaaggaaccatctgggaaggtgggagcacctcacctcactctgtaggctgtcatggctctaataaggggtataggatgggcctctccaggccagatccttgctctggccaaacagggacgcaaggcccgggttcagccgcactctaaagcagcaggtcctgcctctccaacaggttcctgggagggactgcatctctggtaagctccaaagtcccaggagtcagaagcctctagtgcaaggtgcctgagcactggggtcacaggcccaggagcacagtggggcagtgaggaggagctatcactgcaccctccaggcaagagaagtccctgagtagctggtttccctggcccagaggcaggggtggccctgacggtcatgggttttgaaaatccaggacgtggaggttgtaagacagggcagcatagagatgcttggtggtgagacgcaggcagtacacagggctgctgaggggagtcgacgtcagcgggaaggcgtgcaggcaggccctttgacgccggtcccacagccgtacaacaccgtagtaggaggaacctgtggccagcaggtggttgccatctgtctgcaggcagtacagggtgctgtcgtggggctcctcccactccatgacacatttccggacgctggtgcggaggtcccagtagcgaacataggtgtcatagccacaggacagcagtgtgaaaggggactcatacatgacatccagcaccccagcccctgggggaaagtcactgcccaagtgtgtcatcagctgcccactgttgaggtcccagattctcaggggtgagaagtgcccgcaacaagccgtccctgtcacaaaagagctgagtaatgggctgatagcaatggaccagactcggtcttcagtctggatggtgtgtaagcactgccccagccggcctgaggccaaaggccacaccttggccgtcctgtccctggagccactcacaatgatgccccctttgcaatccacacagttcacctcctgttcatgagccgagtacttgacagtgaaggtgctgtgaatcttatgaatgccaatcttcccatcccctcctgcactaacaatatgcgagttggccagcacaaagtggcaaacgtcctcatcatgcccagcaaagactcccagaggccgacgattcaagctggcaccatctggacggaactggtaggccaggatgaaattagcctgggatatgtacagagaatcatcctctagctgcatccagggcatctgactgcatctccacttcagcagaatcccctctcggcagcgccccagtctccagttctgagacaccttcactcgttccttcactgggacactggtcatcaggtcggtgccgagccgcgtgaagccggagttgagcgaggcccgggctatccggcgccagagcagatcgcagctggtgaagcgccgcagccagtggcacacttgggccaggcggccgagggcccgcatgtccaggtaggagcagatgagcagcagcagctcctccggcaggcgccagagcgcaggccccgcggccgggcgggncagtcgactcccgagccgccttcttcttctncctcctcctccccggccggcggcngccat

SEQ ID NO: 538 - DNA, 1878 bp, Homo sapiens; identical to SEQ ID NO: 537
  misc_feature (1)...(1878): n = a,t,c or g

SEQ ID NO: 539 - DNA, 375 bp, Homo sapiens
gttcttaaccctcggaagaaatgtaagaagaagaaatatgtcaactcaggaactgtgacgctgctctccttctctgtggactctgaattcacttttgttgattacatcaagggagggacacagctgaacttcacagtagccattgacttcacggcttccaatggtgagacacggatgagtgaaaaagtcggagggaatcctctgcagcctacctccctgcactacatgagtccctaccagctcagcgcctatgccatggccctcaaggcagtgggagagatcatccaggactatgacagtgataagctcttcccagcttatggctttggggccaagctgcccccagagggacggatctcccaccagttccccctg

SEQ ID NO: 540 - DNA, 660 bp, Homo sapiens
  misc_feature (1)...(660): n = a,t,c or g
ggatcagagtatggaggagaatcaggacttaaagaaggaactgctgaaatgtaaacaagaagccagaaacttacaggggataaaggatgccttgcagcagagattgactcagcaggacacatctgttcttcagctcaaacaagagctactgagggcaaatatggacaaagatgagctgcacaaccagaatgtggatctgcagaggaagctagatgagaggaaccggctcttgggagaatataaaaaagagctggggcagaaggatcgccttcttcagcagcaccaggccaagttagaagaagcactccggaaactctctgatgtcagttaccaccaggtggatctagagcgagagctagaacacaaagatgtcctcttggctcactgtatgaaaagagaggcagatgaggcgaccaactacaacagtcacaactctcaaagcaatggttttctccttccaacggcaggaaaaggagctacttcagtcagcaacagagggaccagcgacctgcagcttgttcgagatgctctccgcagcctgcgcaacagcttcagtggccacgatcctcagcaccacactattgacagcttggagcagggcatttctagcctcatggagcgcctgcatgttatggagacgcanaagaaaaaaaaaaaaag

SEQ ID NO: 541 - DNA, 3803 bp, Homo sapiens
ctcggaagtcgagagaccagggcctggccagattctccctgcagaacctctagacgattccaagaatgccacagggaactcagcctcaggcctgggggctggcaggaccgcagaagataccgtggaagatgcctgcccagccgagggcagcagggaggccagacccaacacgcaccccggcccggcccccaccccggccgagctgccctggaccaatattgacctcaaggaggccaagaaagtgcccagccactcggccgctggcttccccgagaccaccagcctctcctctctggggctcctcccactgggcttggaggagccgtatggggtggatgaccacccgctgtgggcctgggtgtcgggaggcggctgcgtggtggaggcatgtgccatgcccagatggttcactgtccaggcgggtaagggctcctgcagggcctgggggcatccacatggccaggtgccctgggggtgtggggtgtgggaggaggccggggtcagggggctcgggcaggcctgctgtcctccctggacgcctcactgtgctcagcagctctgagccaggcattgcgctcctctgtggcctccagagaccagcccgaggctgtcaggacctggaagcacggtggccagtgccccttcccctgtctgcagcccctcccctgtgctagcggtggtggctgctttccaggctgaattactgggggagagcaactcatccatcagggcaaagggtggaaggaggcttaacagagagcgtagcttttgagctagaaagggctgatttggtggaggggagcgccgtggcttcctgcccagctgcgggcaggacagtgccccggccctgaggctctctctgccccacaggcctgtcctcctcggtacacatgctgtccctgtccatcacgccggcccagaccgctgcctggaggaagcagatcttccagcagctcacggaaaggaccaagcgggagctggagaacttcagacactacgagcaggccgtggagcagtcggtgtgggtgaagaccggggcgctgcagtggtggtgcgactggaagccccacaagtgggtggacgtgcgcttggccctggagcagttcacggggcacgacggcgtccgggacagcatcctcttcatctactatgtggtccacgaggagaagaagtacatccacatattcctgaatgaggtggtggcgctggtcccagtgctgaacgagaccaagcactcctttgccctgtacacccctgagcggacacggcagaggtggccggtgcgtctggctgctgccaccgagcaggacatgaatgactggctcgccctgctcagcctgtcttgctgcgagagccggaaggtgcagggccgcccgtccccgcaggccatctggtccatcacctgcaagggggacatcttcgtgagcgagcccacccagacctggaggcccacgagcaccccctgccctgcgaccagatgttttggcggcagatgggaggccacctgcggatggtggaggccaacagccggggcgtggtgtggggcatcggctatgaccacacggcctgggtatacacaggcggctatggaggcggctgcttccaaggcctggccagcagcaccagtaacatctacacgcagtcagacgtgaagtgtgttcacatctatgagaaccagcgctggaaccccgtcacaggctacaccagcaggggtctgcccacggaccggtacatgtggagcgatgcctcggggctgcaggagtgcacgaaggctggcacgaagcccccgtccctgcagtgggcctgggtttccgactggttcgtggatttcagcgttccggggggcacggaccaggaggggtggcagtatgccagcgacttccctgcctcataccatgggtccaaaacgatgaaggattttgtgaggaggaggtgctgggccagaaaatgcaagctggtgaccagtgggccctggctggaggtgccccccatcgccctcagggacgtgtccatcatcccggagagcccgggtgccgaggggagtgggcacagcatcgccctctgggccgtcagcgacaagggggatgtgctgtgccgcctgggcgtgtcggagctcaaccctgcgggctcctcctggctgcacgttggcaccgaccagcccttcgcctccatctccatcggggcctgctaccaggtgtgggccgtggcaagggacggctccgccttctaccggggatccgtgtacccctcgcagccagccggtgactgctggtaccacatcccgtccccaccgagacagaggctgaagcaggtgtccgcggggcagacgtcggtgtatgccctggatgagaatggaaacctgtggtatcgccaagggatcacgcccagctacccgcagggctccagctgggagcacgtgtccaacaacgtgtgccgagtgtccgtggggcccctggaccaggtctgggtgatcgccaacaaagtgcagggcagccacagcctgagccgggggacagtgtgtcatcgcaccggcgtgcagcctcacgagcccaagggccacggctgggactacggcatcgggggaggctgggaccatatctctgtccgggccaatgccaccagggccccccggagctcgtcccaggagcaggagccgagtgccccaccagaggcccatggccccgtctgctgctgaggcccccccacacacctacatgcagggacggtgcccagtttgggggatcaaggctgagccattcttgtgctggagtgtgcaccgtgggagcaatgtggcccaggtggactcaggagggaacctggccccaaggctgcggccacttcagaggcactggctgagacggccctgaaatgtgaagctccgcggacactcccacacgtgtccccgtctgcgaggagtcccggggtgtggggcatggggtggggctgcacctcccagaggcccctcccacccttcccttcccctctcccttctgcctttccaggactagaaccgggaacctggagccctccgggaacgccggccctggggcagcagagccaggatggagccctcctgagctggcatctcagacagcacccgggcccgccacccctcaccaagagagatggccatggggctcagggcctctttaccatgtgcagtgaccatttctcagagcaggacttgcaaagaggctttaatttcaaaagtgaaggaaggaggccaggcgccgtggctcacgcctgtaatcccagcactttgggaggctgaggtgggcagatcacctaggtcaagagtttcaaaccagacgggccaacatggtgaaaccccatctctactaaaaatacaaaaaaaaaaattagctgggcatggtggtgggtgcctgtactaccaactattcatgaggctgaggtggaagaattgcttgagcttgggaggttgaggctgcagtgagccaagactgcatcactgcactccagcctaggtgacagagcaagccccgtctcaaaaaattaataaggctggatgcggtggctcacgcatgtgatcccagcactttgggaggctgaggtgggtggatcacaaggtcaagagctcaagaccatcctggccaacatggtgaaaccccgtctaacaaaaattagctgggcgtggtggcgcacgcctgtaatcccagctacttgggagactgaggcaggagaatcgcttgaacccgggaggtggaggttgcagtgagccgagatcgcgccactgcgttccagtctgggcaacagagtgagactccgtcacacaaaaaaaaaaa

SEQ ID NO: 542 - DNA, 2220 bp, Homo sapiens
tgtcgtcccgtcctgtgcggccccgtcccgccgcccgcttgtcagccatgagctccacgcagttcaacaagggcccctcgtacgggctgttcggcccagggtcaagaaccggctcctggtccaaatatgacccccagaaggagggcagagctccgcacctgggatcgagggactcaccggcctctccatcggccccgacttccagaaggggcctgaaggatgggaactatcttatggcacactcatgaacaagctacagccggggctccgtccccaagatcaaccgctccatgcagaacttggcaccagctagaaaacctgtccaacttcatcaaaggccatggtcagctacggcatgaacccttgtggacctgttcgaggccaacgacctgttttgagagtgggaacatgaccgcaggtgcaggtgtctcttctcgccctgggggggaaaaggccaaagactaaaggggctgcagaaggggggttggacattggcgtcaagtactcggagaagcaggagcggaatttcgacgatgccaccatgaaggctggccagtgcgtcatcggggctgcagatgggcacccaacaaatgcgccagccagtcgggcatgactgcctacggcacgagaaggcatctctatgaccccaagaaccatatcctgccccccatggaccactcgaccatcagcctccagatgggcacgaaacaagtgtgccagccaggtgggcattgacggcttcccgggacccggcggcacatctatgaataccaagctgggaacccgacaagttgtgacaacttctccatgttccttgcagattgggctacacgcagggcgcccaaacccagagcggccaggtctttcggccctgggcggccagatatatgaaccccaagtacttgcccgcaaggcacaattggccgatggggctccctcgggcaccggcgactgcccggacccgggggaggtccctgaatatcccccttactaccaggaggaggccggctactgaggctcccagcacgctctctccccacatcgtcttcccatctgggtttttgggtttttctgtgttttcatcttttttttttatttttcttaacccgttcagtgctgccagtcaaccaaaagggtctgtgagtgtcagcgtgggatcaaggcaagcagagcttttttccccctttgccttgatcccttcgcaaggctgagccactgggctgtgggggaaggggtcaaggccatatcccaatacgtgtagggcgagggtccctgctggcacattcaggctgtgctgggaagaagagacctgggcttggaaggaacccggtccccgacggtttcctggttagcctcgcctctttccccttttgtcagatgagcagtttgcggttcctatgcccgcaagtttcaggaacgaattccaggagaaaaatacattttttcccccaggggtgggggcaaggacagtggagagagtgctaggaaatgagtcccctgggaaaggggaccggggccgtgatgttaaatatctccggcttcccaagtgactggatttgcctaaggaccttcagatcagacagacttcataccctcagacctgccccggggccaggtggagaaagtgagggccgtacaaggaagtgaaattctgagttgttggggctaagcctgaccccctctccatgctccccgccccaacccactctggcctcagtagatttttttttcagttgtggttgttgcccaggctggagtgcagtggcgccatcttggcttcactgcaccttccacctttccgggcttcaaagcgattctccaagccttcagcctccctgagtagcttaggacttgcaggtgctccaaccacgcccgggcttaatttttgtatttttagtagagatggggtttcccccatgttgggccaggctggtctcgaactcctggcctcaggtgtgatccgcccgcctccgcctccccaagcgctggagattacaggtgtgagccagggtgcccaggccctcagtaggttttaaggagtccccagccctcctcccttctgggcccgaccagcttatactgctccatcttccaccggccacatgccccggcaaagtactgcacagggaccccccaccccaggggacctgctccgtgagataaatgtggaaatacgactgtggaccaaacgcaattaaaacctctgttttgtacggagaa

SEQ ID NO: 543 - DNA, 674 bp, Homo sapiens
tttcgttggtgggttctggggtctacggcctaggggccggggaagtttgcgccgccgcgaccagtgctgcgatcccgagccgggctccagccccgaggaccaggggtcgggcgggcctgcctacggaaccccgcgggccagcagcagtcgtctcgcgtcctcctgcttggaaaagtgtttaagcttctaaaatgtcatctatcaagcacctggtttatgcagttattcgtttcttacgggaacaaagtcagatggacacttacacctcggatgaacaagaaagtttggaagttgcaattcagtgcttggagacagtttttaagatcagcccagaagatacacacctagcagtttcacagcctttgacagaaatgtttaccagttccttctgtaagaatgacgttctgcccctttcaaactcagtgcctgaagatgtgggaaaagctgaccaattaaaagatgaaggcaataaccacatgaaagaagaaaattatgctgctgcagtggattgttacacacaggcaatagaattggatcccaataatgcagtttactattgcaacagggctgctgctcagagcaaattacgtcactacacagatgcgataaaggattgtgaaaaagcaatagcaattgactcacagtacagcaaggcctatgggagaatggggctg

SEQ ID NO: 544 - DNA, 2535 bp, Homo sapiens
gcggccgccggcggccagggctcggcggtggctgccgaagccgagcccggcaaggaggagccgccggcccgctcatcgctgttccaggagaaggcgaacctgtaccccccaagcaacacgcccggggatgcgctgagccccggcggcggcctgcggcccaacgggcagacgaagcccctgccggcgctgaagctggcgctcgagtacatcgtgccgtgcatgaacaagcacggcatctgtgtggtggacgacttcctcggcaaggagaccggacagcagatcggcgacgaggtgcgcgccctgcacgacaccgggaagttcacggacgggcagctggtcagccagaagagtgactcgtccaaggacatccgaggcgataagatcacctggatcgagggcaaggagcccggctgcgaaaccattgggctgctcatgagcagcatggacgacctgatacgccactgtaacgggaagctgggcagctacaaaatcaatggccggacgaaagccatggttgcttgttatccgggcaatggaacgggttatgtacgtcatgttgataatccaaatggagatggaagatgtgtgacatgtatatattatcttaataaagactgggatgccaaggtaagtggaggtatacttcgaatttttccagaaggcaaagcccagtttgctgacattgaacccaaatttgatagactgctgtttttctggtctgaccgtcgcaaccctcatgaagtacaaccagcatatgctacaaggtacgcaataactgtttggtattttgatgcagatgagagagcacgagctaaagtaaaatatctaacaggtgaaaaaggtgtgagggttgaactcaataaaccttcagattcggtcggtaaagacgtcttctagagcctttgatccagcaataccccacttcacctacaataattgttgacgctatttgttaatttgtgaatacgaataaatgggataaagaaaaatagacaaccagttcgcattttagtaaggaaacagaaacaactttttgtgttgcatcaaacagaagattttgactgctgtgactttgtactgcatgatcaacttcaaatctgtgattgcttacaggaggaagataagctactaattgaaaatggtttttacatctggatatgaaataagtgccctgtgtagaatttttttcattcttatattttgccagatctgttatctagctgagttcatttcatctctacttttttaatatatgtcaagtttgaatttgggataatttttctatgattaggtacaatttatcaaaactgaattgagaaaaaattacagtattattcctcaaaataacatcaatctatttttgtaaacctgttcatactattaaattttgccctaaaagacctcttaataatgattgttgccagtgactgatgattaattttattttacttaaaataggaaaaggagcactttaattacaactgaaaaatcagattgttttgcagtccttcctatcttacactaatttgaactcttaaagattgctgctttttttttgacattgtcaataacgaaacctaattgtaaaacagtcaccatttactaccaataacttttagttaatgttttacaaggaaaaagacacaataagaagagtttaattttttttttttttttgagcctgggcgacagagtgagactccgtctcaaaaaaaaaaaaaaaaagaaatgtttcattttggtttttcaccaaccttcctttgataggacaaagcagatactaagagggggaggaaaggctgttctgtgtctgaacccagttgggctagtccccaagaggagctgagagccatgtactctaatgcctcccttttcttcccccagccctgcctgatgtggctctgggaattcctgcagagaagagcaggggtggccaggagatagtgagcagctcccaggaggcatggagggatccagaacctggactgaagaaccacctagaaataactcagcagaattctgaaaatgaggtcacgctgggtaagaatgcctttttttttttttcatagtcaaagttagctatggagtttctgtagtattcactactccagacctttttcaagttgaattttttttctttttccctatgtctgttcttacgtattttttttaaacttttatttcagtagtgtttggggaacaagtagtgtttggttgcatggaaaagttcttcagtggtgatttctgagattttggtgcacccatcacccaagggtagtcttttttatccatcaagtctgtacccaatgtgtagtctttgtttttttctttttttttttttttgagactgagtctcattctatcacccaggctggagtggagtggtatgatcttgactcactgcaacatctgcctcccgggttcaagtgattctcctgcctcagcctcctgagtcgctgggattactgagattgtgccactgcactccagcctgggcgacagagtgagactccgtctcaaaaaaaaaaaaaaaaa

SEQ ID NO: 545 - DNA, 2033 bp, Homo sapiens
agagaaactaaaagtaatataattaaatagcttgttcttgtgacttaaataatataaaattttcatttcaattatgtgacaatgctttgtatagctgtattccaaatacatttcttggtgcgggggacatagcaggcagtcaatacatttttaccaaatgaaatgaataaattaccagttgattttatactgaggaccaaactatgacctttaatccctccaaaataaaacacacaatcccattatatgtgaaccatatccacaataccagaatctaagattcccactctgaaagagtaactagaacaacttctttttgaggcaattctgcttacttagcacattactcccccctacagttttccttcttttgtttttgtactaaggatatttgtataaaaacaggatctttgttgcttagtaattcatctgctccagctgcttgtattctgttcccaatcaaaattcttggttttcagcctcctcatcatttttataaggagttgaatgaattggccaggcttgttcctttctccctctccatggaacaccaggccccaagctccccgacactgctcctctttttatttctatctttgggttgcgtgtacactctagaacacttgtatcagtgaagagtgtaacaaagtattgtgccacgcatagtctctcatatatcatctatcagctcatcaaaaagtgctcactgattaacagaggatcccctcctcagtttcagaattctctagctttaagttaggggagggttaccccaaagtcagagagggcacatgggagagggttgtgaaggccagtagcccagagaaaatcaagggcagctgggtgcatttaggtggataagaaaacaatgaattactcccatcaaaagcaaaagcacaagcacataggaaagttgatcaccccactgttaatgtcaattcagtttaaagcactttattaaccacacatacatattttccagtgtctaattctcatcgtgttcttttccattccagacttccctgtctctttcccagagctctgttcctcttctcactgtttctggaaggcagttgcactcaaaagtgaagtcaccagtctgccgacaggtgcctccattgacacaaggcgagggtgcacagggcacatacaggctgtcacagtactggcctgtgaagccctgaaggcactggcactggtaggaaccaggcaggttgaggcagatgccaccatgctggcagtgtcctggaatgtcacactcattgacatcagtctcacacttctgccctgtgaagcctgtgaggcatttgcaggagaactggttggccacagtggtacaggtacttccatttgcacagggatgagacaggcaggcatcggtccattggcactccttacctgtaaacccgacctgacaggtgcactcataggtatcccggctgagcatatggcatgtgccgccattcaggcaaggtcgagacacaaagcatggatgagatgtcgagtactggcagtcctctcctgtaaaccctgaggcacatcggcacgtggctttccccagcatggcctgggccacacaagtcccaccattctggcagcggttcttctcacaggggtctcgatgttgacaatattcccccaagaagccttctggacatttgcagtatcctgtgccattgtggtaggtaacacacattccttcatttacacagggttcatagccatctcgacactgcaatgcatgcgcgggggtcgcgcagcacagccagagcgccagcagcgcccacagcagagcggggcgcagggcgggcatcttctcggtcgcctcctccgccgccgccgcctgggcagatccacatggggagggggtcccgatagaggagccccactctctcctcccctcctcctgcttcaaaggctcaggccctggcgctacgctccgaagcccaggcgcaaatgcctcgactccccgcgcccggagtccgccgctcctcggccgccgcctcagccgcccgaagtttggctgaaacttt

SEQ ID NO: 546 - DNA, 2796 bp, Homo sapiens
gaattcccgggtcgacgatttcgtcgccacttcagggccggcccgcggaacttttgggcaggtgtcagcgcccgtgtcaccgccacgtcgcggacatggtgatttcagaaagtatggatatactcttcagaataagaggaggccttgatttggcttttcagctagctactcctaatgaaatttttctcaagaaggcactgaaacatgtgttgagtgacctgtcaactaagctgtcttcaaacgcccttgtgttcagaatttgccacagttcagtgtatatatggcctagcagtgacataaacaccattcctggagaactgactgatgcttctgcttgtaagaacatactgcgctttattcaatttgagccagaagaagatataaaaagaaaattcatgagaaagaaggacaaaaagttatcagacatgcatcaaatagtaaatatagatcttatgctggaaatgtcaacctccctggcagctgtaacgcccatcattgaaagggaaagcggaggacaccattatgttaatatgactttacctgtcgatgcagttatatctgttgctccagaagaaacatggggaaaagttcgtaaactcctggttgatgcaattcataatcaactaactgacatggaaaaatgtattttgaaatatatgaaaggaacatctattgtggtccctgaaccactgcactttttattaccagggaaaaaaaatcttgtaacaatttcatatccttcaggaataccagatggccagctgcaggcctataggaaggagttacatgatcttttcaatctgcctcacgacagaccctatttcaaaaggtctaatgcttatcactttccagatgagccatacaaagatggttacattagaaatccacatacttaccttaatccacctaacatggagactggtatgatttatgtggtccagggcatatatggctatcatcattatatgcaggatcgcatagatgacaatggctggggctgtgcttatcgatctctgcagactatctgctcttggttcaaacatcagggatacacagagaggtccattccaacacacagagaaattcagcaggctctagtcgatgccggggacaaaccagcaacatttgtcggatcgcggcaatggattggatctattgaggtgcagctggtactaaaccaattgatcggtataacgtcaaaaatcctgtttgtcagccaaggttcagaaattgcctctcaaggacgggaactggctaatcatttccaaagtgaaggaactccagttatgatcgggggaggagttttggcccacacaatactaggagttgcatggaatgagattacagggcagataaagtttctgattctagatccacattataccggtgctgaagacctgcaagttattttggaaaagggctggtgcggatggaagggcccagatttttggaacaaggatgcatactataacttatgtcttcctcagcgaccaaatatgatttaaaatatcttggagtcaaagactgcagtagagtggtattataaatttttgaataaagaatcagtttaatttttcacattaaatcctggttctagtttgaccatttaaattatgacctttttcaaaggttgtaaatactgcacggagaatgtattttttagacgttcctttaataacttaaaagacaaagcatacacaaccagcatattataggcatgtaaatacatgtgttcttaaatggatcttcacttggaagaaagtttttcgtccttctcagaaggagattagacacaacatatggtaaagccaaaagcaggagcttatagatttgcatgaaatgaaggcgttcttcagacttcttcataacccacgtgacatcagcacttccttttcccactggtattttctacacttccgagactccgtttctgtctgagcacggcaacacaatcattcctgtcagggtgttcacttgcttttattgtctgcatacatttaattgttgtaagaaacttggcacagtctggaaatccacatgaccaagcgagatcttcagctgtttgcccgttcttattacataaatcaatttgggcatcactggctacaagcaggcttaggcactccaggcttccaacttttgctgccttgtgtagtggagcttctcctaaaacatcctgctggttgaggtcagcgcccgtttgcagctgccagagaagaaagcaagcaaggccgcttcctgcggctaagtggacaggcgactgcttgcagggatccgggggtgcgttgaccgaggcccctgtctccagcaaatgcttcagaccatccacctcggggttgcaatccagcaacagcatttcccgcctaaggcagatgacaagagtccttggaagtgcagagaggtgagacactcgccgcaccccgacaggtaagaatgcgcaggctggccctagcacgggagaatttaaagaccgctgggacttccgggccggcccttggcagccgcgccccagctccggttacgcccgagcagcctaatcctcaacgacccggaccctgtccagccccgccacggccgcacgtacacaaacactggcacgtggagcccggcgccgggggcagggggagggggcgggcgcgcgaggccatccgccgattggccagctgtggatgcgtcaggccctcccacctcggggcggggcccgcggcggccccacggagcctcagcgcgcgtgcgcagggtaagtcagtgggcgtgagaggactggagtaggagcgggtggggctccgcggccgc

SEQ ID NO: 547 - DNA, 1391 bp, Homo sapiens
ctcttcaaattaatcaccatatttttaccatacagctgcacaaaagctttagaaaaaaatttcacagaagcatcgaaagcaagcaatatatgtaaaaaatttttttttactaaatcagcataacagactaaagctgcagcatctgctttcatgttacatttggcaaaaacaaaacaaaaagcacccccaaacccccaaaataacaaaaatctcaagcaagtagagacgataaacttcataacacaaaagaaagattcaaaacctgttccctcagtgattggctgttgtcagtttgggcatgcaggcaaatttgttataaccatgatgggaaatgaaaatattttaaggaatccaggacagtatttctatttaaccactaattcaaaaaccaagaaggaagaaaaaataacacaaggggacaccatacatacataaacatgaaaagctagcttacataattacataattagaaaagttaaataatttagtaaaaataaattcccagtataaacccaaaaaagcatagctataaatgcaatccaaaacaaccaattagtaagctggtcatgtttttactggaaaacaacctttctcatttttgttcttacacaagcaagtaactggagaagcaggccagagtgcatacgaggatttaaacatggttgtatctgtggtactttagatgcaactttaccctgttcatttgaaagtttaaatagacctgtctgctacacagactcggatgggccaaataagtcatctgatatgctgctgaatggctgagagtctattagttggcttatttcattatcaaggtcttcttctgtatcatctgtgtacttgcttatttttttggagtgctggtctaaagacagactttctaaagtttctatatcttcaatgcctgctctgtagtgaatcataagaagtgttagagcttgtagcctttcacctgatttagctaaggcagcagaaagaagtgattttttccttgtatcagttgtctctttttcttctctaacaagggaattattgtgttccaactcctgatcaatttcattctgtagcttatccaacatgaactctagtttctggatcctttcctctgtaggcaagcccctgtacagatcacgaccaatttctttaactgcaatgaaaacactgtcatccagaccaccctcttttctcactaactttattcctgtgctgtttccccgtttagaaggactgtttggaccacagacctccgtgtcactgccttcgttgtctgacgtgttgggtgtgtgttttggtgaaggttctacgagatcggttcctggttcagaaaggcgagttttagagacttgacgcaaatttaataaacgagaactagtattgatcccacgcgtccg

SEQ ID NO: 548 - DNA, 1803 bp, Homo sapiens
acccctccaaatctcatgttgaaatttaatcctcagtgttggaggtagggcctaatggggggtgtttgggtcatgggggcagacccctcatgaatagattaatgtcctccctggagagtgagagtgactgagttctcactctgttctttcctgagaaagctgattgttaaaaagatcctggcatctcccttctctctcttacttcctctctcaccatgtgatctctgcatacactggctccccttctccttctgccatgagtggaagcagcctgaggctctcatcagaagcagatgctggtgccatgcttcttgtacagtctgcagaaccggaaaccatctttgtatggcagcctgacttgtcaaggaattggcctagatggcatcccagaggttacagcttcagaaggatttactgtgaatgaaataaacaagaaaagcattcatatttcatgtccaaaggaaaatgcatcttctaagtttttggcaccatatactactttttccagaattcatacaaagagtataacatgcctggacatttccagcagaggaggtcttggtgtgtcttctagtactgacgggaccatgaaaatctggcaggcttccaatggagaactcaggagagtattggaaggacatgtgtttgatgtgaattgttgcaggtttttcccatcaggccttgtggtcctgagtgggggaatggatgcccagctgaagatatggtcagctgaagatgctagctgcgtggtgaccttcaaaggtcacaaaggaggtatcctggatacagccatcgttgatcgggggaggaatgtggtgtctgcttctcgagatgggacagcacgactttgggattgtgggcgctcagcctgcttgggagtccttgcagattgtggttcttctatcaatggagtggcggtgggtgctgctgacaactccataaaccttggctcccctgagcagatgcccagtgaacgggaggttggaacagaggccaaaatgctgctcttggcccgggaagataagaaacttcagtgcttgggactacagagcaggcagctggtgttcctctttattggctcagacgctttcaactgctgtacttttctctctggcttcttgctattggctgggactcaagatggaaacatttatcagctggatgtgaggagtccaagggctccggtacaagtcatccacagatcaggagcaccagttctatccctgctaagtgtcagagatggattcattgctagccaaggtgatggaagctgttttattgtccagcaagacttagactatgtcactgagctcactggggctgactgtgaccctgtgtacaaggtagccacatgggagaagcagatctacacatgctgtcgagacggtcttgtacgacgctaccagctttctgacctctgacttcttggaaagagcagtcccggttagtgaaaaggtttgaccctgatcaacaatgagcagaaacatcatcagtccttcccaaggaccatggcgtttaatgtcttgggcaccccttggaaatcacagaaagtcagctgtactggccgtgtggaactctcatcccaagacctactttgaactgagtaagaaggtcattgtgcccactgcatttgttccaacttctccttgtataaactcaccccagcaacacagggcaaggatatagatgcttttagtttgttcttaaaccagttttgttaaatgtttacaaggacctcagtactaaagcctgttctctggaggaaataaagaaaatatgtttggaggtgcctgaaaaaaaaaa

SEQ ID NO: 549 - DNA, 1010 bp, Homo sapiens
ggagatctccccttctttgtgaatcactcagcccttcaccctggggtgaggctgtaaggtaactggtggtctccagaggtaacaggacccaggcccatgcagtgaagggcaggagtggagttgagcaggggagacagggaggtcagagtctggctggagcaggcccatggatcctcactcccggcctgcctgctgggccggacaggggataggcaggaaggcaggatgcccacggccgagtccatgctgccttccttctcccctccttcgcccagggtcctgcatcctcaagccccctctgtggctgccctgcacccctgcctgacccccggatgccatgcacctgcccctgcactggctccctgcttggcactgccaagcaccctgctctgcttacagtggcccgttgacctcctgcccccaacccccgcttgctgagaccctccccatgccaggccaatttcttccttccctgtgcccacctgggactcctaagaggtgctcaccagagggttgagaggatgtaacacccactcgggtcaggctctgccccgggaaaccattacctgcttactctcgtctcttcctgcccttctgttgctccagtcttggagggggcaggggaccgacactcacatctatcaggcctggagttactgctctgcccccatgccctggtcgacactgtgcccgccccaccctcagccctgcacggagacacacacgcccacacgcacacacatgtgcacacacattgccccatcgcacaagaaacctgcagaggacccccactgggggcatcgaggctcagccctcagggcccggggcatctgactctggccccccaggaggggagctatttggacttttgggacacccaccgaggagaccctaagccaagaaggagaagaaagagccttgaagaccttcagtctgacccctgccaccttccggggcatttgggcactgtaggaaaagaggccagctctgcagccccctcggggacgccc

SEQ ID NO: 550 - DNA, 1800 bp, Homo sapiens
ttttttttttttagatttaaaacagcatacatttattatctgaaagtttctgtgggtcaggagtccaaacgtgatttagctgggtcctctgctcagagtttcacaaagctgcaagcaaggcgttggctggggctgggcttttatctgaggttcagatgcttcttccaagatcacatggttgttcacaaaacttatttccttgcagccgtagagctcatggcagcttgcttatttaaggctaataggagagagagtctctgactggttcactctcttttaaaggactagtctgattaggtcaggcccacccaggggatctctttgattaactcaaagtcagctgattagaaaccttatgtatatctgcaacttctcttcacttttgttatataacataacataatatgggagagatgatcccatcacttttgccatattctgttggttagaagcaggttacatgtcccacccacactcaatgggggagaggattataccaaggcatggattattgagaatcactctagaattctgtctatcatagtgtaattatatatctatgtagtgaaaaaaatagatgtttgtaatttggaggtattaaaaagttgaatacaaagaaaaaattatagaactttaaagtcttaattttaatggagatggcacattattttgaagatagagaaaatggctttctatccttttcctatattacacttagtgccttgggcaggatatatgtccaagtatctaaactgtagattatattatatgaacttaaatggaataattaaataagtaattctgaaagacaagtatttaatgacataactggcttgatttgggaacccattttaccatgtgttagcctcagttgtagtaagcagaggatcatgtaattatatgtctataagtaagttatatggtttttctcagtgtacattagttcaacgtttttaaaggttttttttttttaaagttttcttttaatacctttgacagactgtgattttcatcagaagtgctaatctttcctcaggatggagagttcaggcatcttttcatgttgttttctcacagttttaaatgacatatctacagaagttcttttatcagtgacttttcccttcctggccccacactatctgagggcatactctgtagctccttttattttattttatttttgtgggcatcagatatattctgaagtcaatactaaagctgttagagtatgacatttactaagaatcctgccattttaggcccttcttcttaaaggacaacaattccatggggtatttaggtaaaaaaacaacatggcttggtaaatttagctctttttcttgacattggcaatgataatacaatgcctgtggtgtataattgtcatggctgacttataaattccctacagatatgtggttacttctctactttccctttctttggcttgggcaactgccacgttgatgcactggagccattcttctgcattcttctcatccttggccttaaagacataggttttattgtctgtgaagatttcgaaagcccgggggagagagcggtccctgcgtttcttggccacagccttcacactctgtactttgatgagttctattgggcagtcgtcagggtcatctttagactttcctttttgaaacagaagttgatttccagccagtgtaaaatagcgtgttttccaccttttgatgaacttccatctgacttgcttctctttaagctttcattctatgagaggctggccatcttgatttacaacagttgctttctcaggat

SEQ ID NO: 551 - DNA, 1791 bp, Homo sapiens
ttttttttttttgcaatactgtaacgacagcttattctttaataaaagtcaggggtgtcagcagcgtcactggtaagacatgatggcgctccacgactgaccagcagcgctgggaagggacacgcagaacccaccttccaaccacgcccaacacatcacagaaatgcctgctcgtttgttttgattcatatacaaagttacaaagtatttcctgccccaaattcttaacgaaaatgaaagaaaaaccctaaaatgcggtggttttacaagtatattagcccagaacatcctagggcagctgcgcgggccgcgggtgcggcagggcgcaggcgcaggcaccgcagagccccggccagcgcgaaacggacgcaggcgcattccccagccctccgtggcgttctcagcagcagatcgcccaggcctggcccggtcgggcttggtgttgcctccgaagtcgagacgacggtgctgctcagttatcttccgcctttccgcactatggtgggcaggcgacactgctgcggggcaggcttaaggtcccttccgcggatctgtcttcttgctcgcagggatgcactttcagggtctcagcaaccgcactcttccatttgttccagatccaagcacggactggcagcgtggggcttgagtaggacgacagtctgaccactccccgaaagctttagtttgggcgagttccatgacataggccggtcctcgtctcttgggacggtcctcctcttgctttagggactgtttctctgttcttggaagtaggggtgctgcagggcctggtgggcggcgattctctcatcgggaatcatagcccaccattgcgtgcaggagggagaggcattgtggggacaaattggttgttagtagaggtattcctgatccctttttaaaaggaaaatcaaaattcatagctctcgactgtttgaacttggtgaggatcttctgagcgggtgtgccgatgacatcgtggatttttgagatttggtccagttcatttactccaggaaagaggggctgcagactggcgatctcgtagaacacacagccggcgctccacaggtccatcttgtacgtgtagaacccatcagtgaggagacactccggggcccggtaccagcgggtggagatgtattccgtgtacggctgcttggaatagacactccggcaggagccaaagtcccctaatttcaggacatcctttattagtatattttctggttttacatctctgtgaaatattccatttctgtgaatatgatccagggacttacataactggtacatatagtgcataatttttttttctgataatgggtatcttctccctcgtattagctcataaatattcatgtccataagttcacatattagtgcaagagaaccagattttctgtcactttcaaagcgctgcttcatttgtttacatgcatagtagtttccatctctcaggctttgcatcttcataacttcagaaaacgttccctctcctattttgccaattgctttatagttcttcatcttggatgcggaagccggtgacaaccccttgccgacactggacggaaaagaaagaagcaggaaggttgtccccctgctttccacttccctgaggcggggtcccgcactaggatctccgtggtggtccctcgaaggagagcgttagagatcccgccgccatgttgtgtccctgtcaccctagcaaccgtcaggccctgaacgccacgcaatcgtctctccggccttccgtggccggtccctcacgcatgcaatctatgg

SEQ ID NO: 552 - DNA, 1795 bp, Homo sapiens
ggctcgggctcggctccgggacgctgctctccgtgtccgagtacaagaagaagtaccgggagcacgtgctgcagctgcacgctcgggtgaaggagaggaacgcccgctccgtgaagatcaccaagcgcttcaccaagctgctcatcgcgcccgagagcgccgccccggaggaggcgctggggcccgcggaagagcctgagccggggcgcgcgcggcgctcggacacgcacactttcaaccgcctcttccgccgcgacgaggagggccggcggccgctgaccgtggtgctgcagggcccggcgggcatcggcaagaccatggcggccaaaaagatcctgtacgactgggcggcgggcaagctgtaccagggccaggtggacttcgccttcttcatgccctgcggcgagctgctggagaggccgggcacgcgcagcctggctgacctgatcctggaccagtgccccgaccgcggcgcgccggtgccgcagatgctggcccagccgcagcggctgctcttcatcctggacggcgcggacgagctgccggcgctggggggccccgaggccgcgccctgcacagaccccttcgaggcggcgagcggcgcgcgggtgctaggcgggctgctgagcaaggcgctgctgcccacggccctcctgctggtgaccacgcgcgccgccgcccccgggaggctgcagggccgcctgtgttccccgcagtgcgccgaggtgcgcggcttctccgacaaggacaagaagaagtatttctacaagttcttccgggatgagaggagggccgagcgcgcctaccgcttcgtgaaggagaacgagacgctgttcgcgctgtgcttcgtgcccttcgtgtgctggatcgtgtgcaccgtgctgcgccagcagctggagctcggtcgggacctgtcgcgcacgtccaagaccaccacgtcagtgtacctgcttttcatcaccagcgttctgagctcggctccggtagccgacgggccccggttgcagggcgacctgcgcaatctgtgccgcctggcccgcgagggcgtcctcggacgcagggcgcagtttgccgagaaggaactggagcaactggagcttcgtggctccaaagtgcagacgctgtttctcagcaaaaaggagctgccgggcgtgctggagacagaggtcacctaccagttcatcgaccagagcttccaggagttcctcgcggcactgtcctacctgctggaggacggcggggtgcccaggaccgcggctggcggcgttgggacactcctgcgtggggacgcccagccgcacagccacttggtgctcaccacgcgcttcctcttcggactgctgagcgcggagcggatgcgcgacatcgagcgccacttcggctgcatggtttcagagcgtgtgaagcaggaggccctgcggtgggtgcagggacagggacagggctgccccggagtggcaccagaggtgaccgagggggccaaagggctcgaggacaccgaagagccagaggaggaggaggagggagaggagcccaactacccactggagttgctgtactgcctgtacgagacgcaggaggacgcgtttgtgcgccaagccctgtgccggttcccggagctggcgctgcagcgagtgcgcttctgccgcatggacgtggctgttctgagctactgcgtgaggtgctgccctgctggacaggcactgcggctgatcagctgcagattggttgctgcgcaggagaagaagaagaagagcctggggaagcggctccaggccagcctgggtggcggcag

SEQ ID NO: 553 - DNA, 464 bp, Homo sapiens
cgaggatcgggaagaccacgtccccaagttggagcaaataaacagcacgaggatcctgagcagccagaacttcaccctcaccaagaaggagctgctgagcacagagctgctgctcctggaggccttcagctggaacctctgcctgcccacgcctgcccacttcctggactactacctcttggcctccgtcagccagaaggaccaccactgccacacctggcccaccacctgcccccgcaagaccaaagagtgcctcaaggagtatgcccattacttcctagaggtcaccctgcaagatcacatattctacaaattccagccttctgtggtcgctgcggcctgtgttggggcctccaggatttgcctgcagctttctccctactggaccagagacctgcagaggatctcaagctattccctggagcacctcagcacgtgtattgaaatcctgctggtagtgtatg

SEQ ID NO: 554 - DNA, 1002 bp, Homo sapiens
ttttcaaccttaaaaaattttaatggaattttcttcttttttttttttctttaaataacaatttgacaaaagggtgaaaaaatcctaaacaaggtattgaggccagtgtccaggctgcattcagttcacaaaactgtcctcaggacgttgcatggaactggaaatgtgtataattacagaagaaaacagggaggacttagtgcagagaggagacgagtgtggacgggcaacagcatccttagtctttcatatttatatatggtatatgtattttctatatatatatttatatattttacatccaggtatcccagtcatctgtaccatttcccagggagacatgggtgcttccaaggcgagacaggaaagggttaggcagggaaggggcagcgacggtgcaggctggggcttggctcacagaagctgcaggagcttcagcgactgtaagagggccccgggctccgcagacgccaggtactggcagcaaagccagtcctccagctccacgccccgcctgcgatccaccgccttctccgcaaacttcatcatcatcagggcccgcttcatgtcgatccagttgtgcagcgtgccgcacagcgcctcctccgaggtgcccggctgctgcaccagctcgcgccgaggcccccacagcaggcactgcagcacgcgcttggcctcgccgatgcggatacgcttgatggggtcggcctccagtagcagatgtgccagctgctgcaggccgggtgagtagagggacagcgcgggcagcggcggcaggtcctcctgccggtagtctctctcccgcagctgggcgcgcacctcgaacgggttgggttggtgcagcagctcgtagatgaggatgcctgtctggaactcatcgaacttgcggtactgggaagcagacacgatatcgggggccagccgggcctggctcttcttctgctgcaggtttggggtgctgcccggcttctgcttggccttcaaaaagttgctgatgatgag

SEQ ID NO: 555 - DNA, 3795 bp, Homo sapiens
  misc_feature (1)...(3795): n = a,t,c or g
atggtttacaaaatgcgttatcggtctcagcacccctatagcatcaaggaaaagcagatgaagagtgaagtgttgtccgttaaagagaaaattggttatggcatgggagacgccgccagccacattattttcgataacgtaatgttatatatgatgttcttttataccgatatttttggcattcctgccggttttgtcggaaccatgtttttggtcgctcgtgcactggatgcgatttccgatccttgcatggggttgttggccgatcgaacgcgctctcgctggggtaaatttcgtccgtgggtactgtttggcgcactgccattcgggatcgtctgtgtactggcctatagcacgccagatctcagtatgaacggcaaaatgatctatgcagcaattacttacaccctacttaccttactttataccgtcgtcaatatcccttactgcgcattgggtggtgtaatcaccaatgacccgactcagcgtatctcgctgcaatcctggcgttttgtgctggcgaccgcgggaggcatgctttctactgttctgatgatgccactggttaatttaattggcggtgataataaaccactcggtttccagggcgatttaagcccgatgttctctacacctgaagagatcgcccgacctggaccgtacgaaaacgacgttcacgtagtgggcgcatcctcactggctgccggtcataaaacgctgatcccggaactggtacgaagcgctgaacaacacatggggacgcgaagatatctgcgtggtcgacgggtggcagtcattccgccgacaggattacgccttcctgcaagagcgcggcagtggcggcgatttatggtccagcacactcgcccaggccatgacgctggtggaaaggcgtcaccgcgtcatcaggcactaagtacgcagctgcttgatgccattatgccgtactgcggtaacaccctgcgactgggcgttaccggcacccccggcgcggggaaaagtacctttcttgaggcctttggcatgttgttgattcgagagggattaaaggtcgcggttattgcggtcgatcccagcagcccggtcactggcggtagcattctcggggataaaacccgcatgaatgacctggcgcgtgccgaagcggcgtttattcgcccggtaccatcctccggtcatctgggcggtgccagtcagcgagcgcgggaattaatgctgttatgcgaagcagcgggttatgacgtagtgattgtcgaaacggttggcgtcgggcagtcggaaacagaagtcgcccgcatggtggactgttttatctcgttgcaaattgccggtggcggcgatgatctgcagggcattaaaaaagggctgatggaagtggctgatctgatcgttatcaacaaagacgatggcgataaccataccaatgtcgccattgcccggcatatgtcgagagtgccctgcatattctgcgacgaccgcctatgcatcgtgttcctagaaaccctaaggtcaacctgcttcctggaaccgctatggccaatctgctgtcctaggaccgcaatggccacgctgggtcctaggaaccgctatggctttgatccattggctgtttcctcggggacccggtcttgttccttgggggttcctcgggcacaccgcttcgcccttgcgggttctcgggacccaggctatacgcacaagcgcgttcttgccatattccaagcctttaacgcgttcccggaaccaccggccaacacgccggaagatccggcaggtctctctctactgccatcaggccacacgtctgctcgagagcctggcctctgtctcccaatcaactcgctttgccctattgttcagtctctctggccctcatcactgcgctctacccaaccgctcacaccccttcccagctgcccctcccaggcccatcaccctggcagcgtggctccgtgcggtgcagcctggtacccggcggggcacacgcacaggaagctgcctggcgtgttctcgcagcgcccgaggtcacacggcggcggcacgcggtggcactcgtccacatctgtaggcacagaccaggcggctgggactggggcagacagccccgggagaagcgacgcaaggaggcaggggtcagcagggaagcgggcagcgggaccaagcttgggccagagccaggatggggacccggccaggaccagccggcagcaggggcacagtgcagcagcaggcaatcgtggcagggcagggtttggtcagcgccacagggcagaaaggcagcagctttggggaccaagctcacgggaaggtggggtaggggctagagaagaacaggagcagtttggggataggggctctggtgtggcagggttggaatcggggtcgcggtcaggagattggttgccgcagtttgcaggacagtggccgcggctgcgggaggcagtcagtcagcgcagggctcacgcagcgcacggacgaacggcagcggcgtgcggatactgcactcactttggcggattatcggaatacctctgttactggggtattcgctggtttgttctagagtgcttttggcctgcttttggcctggttccgatttttggccgcgaagcaggcgaaaaacctatggcaccgtcccccagtcgtgctactctttttacgtcgcacttgactgtggaggcgtttcccgtctggtcatatttgtatcctggcgaaacccccaggttgcacccacgagcgcacaccagaaccgtcccagccgcaatccggtatccagaccgccaaacacccaacgggttgcgaggcgcaaacactatgcactcgcagatggatacactgaacggagatggacgaacgcaccttgcagggcagagagctcgttccccccgaactgtccgtccggagcgccaataccggattcatacgacaagtgaccttcccggaatgtctcgtcaataccgctcaggctgctgcctaggattctgtcaggtgttgttgcccgatgacaacggtaaattgcagccgttaacacatccgcaaggaatgacgccgtgggacgatgccatcgcgcagtggagttttgataaaggcctgcctgcgggcgcgggcaccgacacgttacccggtgtaccgtaccangattttgccgctaaaaagcggcgagaaaacctacgggctggtgaaatcttaacgctcgatctggcaagcgaaggatcaccccacgcccgccaggccagcgagatccgtcagcatgtgctgaacactacccgactggtgaataatctactggatatggcgcgaattcagtccggcggctttaatttgaagaaagagtggttaacgctggaagaagtagtcggcagcgcgctgcaaatgctggaaccgggtttatcgtcgcccatcaatctttctctgccagaaccgctgaccttaatccacgttgacgggccactctttgaacgggtgctgattaatctgctggagaacgcggtgaaatatgcgggtgcgcaggccgaaattggtatcgatgcccacgttgagggcgaaaatctacaactggatgtctgggataacggccccggtcttccgccaggccaggagcagacgatatttgataagtttgctcgcgggaataaagagtcggcagtaccgggggtagggcttggactggcaatttgtcgggcgatagtggatgtacacgggggcactattaccgcgtcaaccgaccggaaggtggtgcctgttttcgtgttacacttcccccagcaaatggccctgaacttgaaaatttcctga

SEQ ID NO: 556 - DNA, 1503 bp, Homo sapiens
tttgatttatacaggattatttataatgttttccttcactttgtagctgaaatgtatttttattttatttaaatgttttaatacatgcctaacacacagtttcctcattattattccattcaacattttgacacaaatttttttctgcctatatattgaacacaaatttatcttttcagctgatggttcacaatatagatgtttatcttttaaaatttcttcattcattcttctaacgtgaaaaaaaaaaaaaatcccatccaattaacgaaactttttcttcaactgggtagtcagcaaaaatattatcatagttcacttaaccggttctttcaaagtacatttttccaattcaaggaagcggcaaagaaattgtagaaatgggttccatatcttcctttagtcacatgtagtgccaagaataaggtgtctatttagcatgtttctgactttccatggctcgcagtgaattgtgggtatctatgcagtaaaaccatggaaataaacatattcctcagctgtgaatccaccattcccttcgttacatatttccccaccttgctgaagaagaagctttactaaacatggtggttcaccactgacagcaagaataagggctgttctttgataattatctgaagcattcacatcagcccctttcctccagaagaaattttaccaattttgggattaattgttaataacgggcaaccaatagtggggtatacccatccttatttttcgcttcaagatcagcttcgtattcaagccagtttttcaactaatgaccaaactttgaccacaaacagcatagtgaagaacagtattataacgaatatccctcagatctgggtctgcaccaaagtttagaagaatagtaggcacaatcctcattttgacactgtactgccttaatcaatggggatttgttttcactatcccggacatttattttgcattgttgcctcaattaggaaaagtacaacatctgtatgtccattagcacaggctaggtgcaaaggtgttctgtattttttgtcctgcatatttacatcatatttcttgatctgaaggtattccttcagcttcttcaaatccccgactgaagcagctctgtgaagtttctttaaatccttttctcgaaggttgtagccctggctgcgggtctcattcttcctcttccagaagctgaaaagcttattcatggcggtgcaggctgcagcctttccctcagaccaggatgtttcttgaactcctagccgtccgccctgcccctctgccctggcatccggccggcagccctctccagtacctgacgaaagtggaaatgctggaagggcctcgcgcagccggccgttatggcagttacggccgttatggctgttaaggtcgttatggtccggtcctaggggctcgcagacctgcattctcacctcaggtacccgatctgatggttgacctgctccaaacacagattctacaatgtgccccactcccaatccc

SEQ ID NO: 557 - DNA, 1553 bp, Homo sapiens
ttttttttttttccatggcaaaacagccctttatcaagagttgcaggataaaaatagtctttgcagccagacatccctccaggcatgtcttctgacctgagaggggccagtgtcctgtacagtagaagccggggtttccgtgctgcacccgcagcaccagggcacgcaccgtggggaggcagccttgggctgtgcccgcgacagggcccctgcatgctgagcaacagcctcacatgagcaggcagcacggcctcctctccacgggagcctccaccgccggggctgtgagcttgagcaggggtgggtccccgcctgccctgaagccacagtcaggctggggggtcaccgtgtcaccaggcaggccaggctcagctgtctcagggctctcgggcccctcaggtgggggtcgctgcagcttggcagcagctcgctggcgcttcaggtcagccagggtgtggtgggccttgtcgtggaccagggtgtggggggtggtgctgtccagggggctcagctggtaggagacactccggtctagtcgcttggagtatagatgccgcactggggagccccctactcggccattgtgcggcctgaccacttcggggttgtcctcctccgggggcggcggcctgagctctgcgcctgtctggcggtcatcgttgtcctcgggcggctccgggctggtgggcggcggctgttgccacacgatggcctcctgggcgtgctgcttgcggtacaggtcggtgcgctgggttaggctcacccgcctcaccaccttcccgcggctgccggcgctggaggtgcggcggcgcagcaaggagcgctggcggctctgggcgcgcaggagggcgtcgtgcttgtgcttcagctccagcagcttggcccgcacctcctcgtccccgcacacatcaaggggcgtctcgtccatcagggactttgcgttcaggtcggccccgtgcgccacgagcagctccaccaggggcacctggccccagtaggccgcggcgtgcagcggctcccagccgtcttggtccttagcgctcaggctggctcggtgttccagcagcagggcagccgcctcgctgaacccgttggcggctgcgacgtgcagcagcgtggccccgtggtccaggggggcatggaggtctgccccggcctgcagccggctccggatgtcgtccagcatgcgcagttctggcacggcccgggcggcctcgatgctgtcctgggtgatgccacggtcggccatggcagtctccaggcagtccagcgtctgctcatcatcacacaggtcatagggcatgttcccgtcggtgttgaccgccaggagattggcgccactggcgatgagcagctccaccaggtgcaggtggccgcaggtggccgcagcatgcagaggcgtccagcactcactgtcacaggcattgatgttggccccagcctccaggagctgctgcaccatctctcggaaatcatcaatgcagcactggtgcagggccgtcaggccgtcctcgttggccaagtcagggctgaccccactcccaaggaactcc

SEQ ID NO: 558 - DNA, 1046 bp, Homo sapiens
  misc_feature (1)...(1046): n = a,t,c or g
gggctcagacaggtctgaccagtctttaatgggcaggcaggtgcccgaggcagcctccagcatgaggcgggacaggcattgcccggaggtcctctgggtggggagggcatgctcggtgcttgctgccagctggagccagggctgaggcgtgcagggatccctggccctcacggccaccctgggtgcttcaaggatgagggcggagctggcttcactggggcacagggctgggggcagcctccagtcttgccctgctgggcctttcggctccagttgaggaggggccggggactggcccacgtggatgccggggtcttgcaaccatgctccctctggctccttagaagccccctggggcccagcaggacgggccggcggtcccccaagctgggcagtctagagctgggcagcagcgacaccacctgcaggctggcgcccgcctctcccgcagccttcagctccgtcaccacctccgcgtgtctccaccacctgcatggctgcccattcactgacacaatgtagtcgccctccttcaggccagccgccgcggcctggctccctggaatgacggcagcgatgaggacaggcgagtctccccgaagcgtgaggccaaagccgccctctcctcgggtcaggtggacgggccccaccagccgccaccggttcttggctgagaacacagacaggggcccctggcaggggctcagaggtcagaggcccagctgggccacacactgaggagaccccacctgactagcacatccatccaacctgtgcaccgagggacaccgtggggttccacaaggtgggtggggagggctggaccaccatcaatggcctgtctgaggccatgtgctggtcagagccacacagcccaagctgcccatgctgggcggtgcctggggacgggtgtgctcaccagccgatggaagatgtcaggccccttcccctgggacaggcgtggcatcctggcctctggnnttccnccgcnctggcgcagtggactcaggtttttcaattggngggggngccctggaaccataaca

SEQ ID NO: 559 - DNA, 1049 bp, Homo sapiens
ggacccgggatgagctggaccagttcctggacaagatggacgatcctgactactggcgcaccgtgcaggacccgatgacagggcgggacctgagactgacggatgagcaggtggccctggtgcggcggctgcagagtggccagtttggggatgtgggcttcaacccctatgagccggctgtcgacttcttcagcggggacgtcatgatccacccggtgaccaaccgcccggccgacaagcgcagcttcatcccctccctggtggagaaggagaaggtctctcgcatggtgcacgccatcaagatgggctggatccagcctcgccggccccgagaccccacccccagcttctatgacctgtgggcccaggaggaccccaacgccgtgctcgggcgccacaagatgcacgtacctgctcccaagctggccctgccaggccacgccgagtcgtacaacccaccccctgaatacctgctcagcgaggaggagcgcttggcgtgggaacagcaggagccaggcgagaggaagctgagctttttgccacgcaagttcccgagcctgcgggccgtgcctgcctacggacgcttcatccaggaacgcttcgagcgctgccttgacctgtacctgtgcccacggcagcgcaagatgagggtgaatgtagaccctgaggacctcatccccaagctgcctcggccgagggacctgcagcccttccccacgtgccaggccctggtctacaggggccacagtgaccttgtccggtgcctcagtgtctctcctgggggccagtggctggtttcaggctctgacgacggctccctgcggctctgggaggtggccactgcccgctgtgtgaggactgttcccgtggggggcgtggtgaaaagtgtggcctggaaccccaaccccgctgtctgcctggtggctgcagccgtggaggactcggtgctgctgctgaacccaactctgggggaccggctggtggcgggcagcacagatcagctgttgagcgccttcgtcccgcctgaggagccccccttgcagccggcc

SEQ ID NO: 560 - DNA, 784 bp, Homo sapiens
tttcgtgtcagcacctctgtgtgagaggctgctacctgaggtgggatggccatgggtgggtcccagctcctgcaccccagtgttctcccacagggttctctctggctcccacacccacccctcattcctcagtttccccatggagggcagctgctggcattcttgctctgcccaggcttactatgaaggctgctgaggaacctgtaaacacatctctggcctcaccagaggcccttcctgttcgcattcctcagatggcaagactgtaaattcacctgtcacccagaatgccgcagcctgatccagttggactgcagtcagcaggagggtttatcccgggacagaccctctccagaaagcaccctcaccgtaaccttcagccagaatgtctgtaaacctgtggaggagacacagcgcccgcccacactgcaggagatcaagcagaagatcgacagctacaacacgcgagagaagaactgcctgggcatgaaactgagtgaagacggcacctacacgggtttcatcaaagtgcatctgaaactccggcggcctgtgacggtgcctgctgggatccggccccagtccatctatgatgccatcaaggaggtgaacctggcggctaccacggacaagcggacatccttctacctgcccctagatgccatcaagcagctgcacatcagcagcaccaccaccgtcagtgaggtcatccaggggctgctcaagaagttcatggttgtggacaatccccagaagtttgcactttttaagcggatacacaagg

SEQ ID NO: 561 - DNA, 6336 bp, Homo sapiens
caatacgagtaattggtgagagtgacatcatgcaggaattcctatcagaatccgatgagaactacaatggtgtgtccgacgtagagctgagagtagcattaccagatggaacaacggttacagtcagggttaaaaagaacagtactacagaccaagtatatcaggctatcgcagcaaaggttggcatggacagtacgacagtgaattactttgccttatttgaagtgatcagtcactcctttgtacgtaaattggcacctaatgagtttcctcacaaactctacattcagaattatacatcagctgtgccaggcacctgcttgaccattcgaaagtggctttttacaacagaagaagaaattctcttaaatgacaatgaccttgctgttacctacttctttcatcaggcagtcgatgatgtgaagaaaggttacatcaaagcagaagaaaagtcctatcaattacagaagctatacgaacaaagaaaaatggtcatgtacctcaacatgctaaggacttgtgagggctacaatgaaatcatctttccccactgtgcctgtgactccaggaggaaggggcacgttatcacagccatcagcatcacgcactttaaactgcatgcctgcactgaagaaggacagctggagaaccaggtaattgcatttgaatgggatgagatgcagcgatgggacacagatgaagaagggatggccttctgtttcgaatatgcacgaggagagaagaagccccgatgggttaaaatcttcacgccatatttcaattacatgcatgagtgcttcgagagggtgttctgcgagctcaagtggagaaaagaggaatattagttagagactgattatctcatgtgagccaggacattcttccagcaaggttggcctctggatggtgaacgggctgtgcaaaaaagccctgcttcttcccttgtctagagggtggacattggctacaggctcttccatctctcatgacttcatggaccctcctctgccagttttttaaatcagatcaccctccatgttgttcctgacccacaggggaagctgtcctcagttgtagccgtcttgactggatgagtcctggcagtctttctaggcgaaccaagaatgtttgtgtgagggaaggtgtttgctgttgctttactgctgtctgtatgtgccagtgctggaacagaatttggaagattctgaataattagttacttattctcaaagaaaatctttgaaagaatcaggaggtcaagtcaagaacatgaaaatttatattttagtacagtagaaagaacattgggctctgggaattttatctgggttttctcctggctttttttttccctctgtgtaattttgggtaaatcagcctccctagctttcagttttctcttctgtgaaacaggaagactgaaccacgtaattaatatccaaggtcccttccggctctaaaaggctatgattctagatgagaagttatatcaagaaagatgtggccaatcagattgagtcatccaggcatacctttttagcttctgtttgtggagttgtctccagataagaggagatgtgccttcccaataactcttttttttttcctttcagaacattttccagatggcgaggccacagcagagagatgtggccacctagcctttccttatccccttcccttcccttcacccccatcctcttactcctttcatgtcccatttcagacagagtaaccattaacaaaaaagaagagaaaaagttaaagtcgttatattcaaaagccctaaactaaatattattaataaccccctctgaatttcatgtctctggaattgaggtggtagtgaacagcagatcggtcagcaccagaagtcaactgagttaaggcaggaaaagaaataagcccaaccaacttgccaaaggtatctttgtcctttcacctgggcctcataccaacagcctctccttgtactatatttttaaaactggaactatgaacttcatccatttgcactgttcagacatatatatgtatgtatgtaaaaattatatatacacaaattagctgcacgtatatacatatatatattactatttaaatttcatattgatggcagtaccttttttagcttgtgtttttacacacctttcactagaatccatgacctccctcgtgctctctttcttttgaaacaaactttaaaaaggaaaaaaaagcattttacagggaaaaatacctctcctcatgaaggacttgaaaagtttacaacctgcttggatttttgcccctttttttgtattgagtatagattccggctcatgggttgccaatagagtctaggaacaaggagtatagtttctttatcttccaagagggtgctggggagaagaaagaggtgtgtttctcaaggttaacaggctgtagttctgcagggagagcctgaagtcctggtatgggctcttgattctgtgacaatttttttgatccatctatttctctcactcctggctttctagccacattctgcacctccttcctgctttcctagagcctcggtatgctttccctcaaccgaccctggctcaggaggttgatgccatgggaacctgaacctgaaacacttcatggtagtaatttcctgttttccttgccttttttttttttttttttttttttttctgagacagggtcttactctgtcgcccagactggaatgtggtggcatgaacatagctcactgttaccttgaattctgggctcaggtgatccttccgcctcaccctcctgagtagctgggactacaggtgtgcaccaccacacctggctaattcttcttaaaatttttttgtagagacagggtctcactatgttgcccaggctggtctcaaactcctggcctcaggtgatcctcttgtctcagcctcccaaagtgctgggattacaggcatgagccactgtgtccttccctgccttttttgcagcagggatagtactcaggaccagagttaagctgataccttaggcacacaggttggacttacatagaggaaagaaagcaagcaatgccctatgtacatgaggttttacctcctccattcctgaccaataaccacccataactacggcattctctgtgacttccttaaacagcagtgatgggaagggatccaatagtatcttcaaggccttggggaaacttgcagtgggtcagtggtctgtgccaaccaaacgatagccccatccaagccagctgagaacctaggaaggagtagtaggaatatggttgattagattggatctcccaagttttaattgaaaggagactgaacgaaaacctgttctgctttctgtccgttaaagagctcctcatctgatcttgcagctagaccctttgagacttaagagctgcatcccaggatcagaagccagggctaattggggtaggacaatattcccagcccctaagctctgtagataatgcataagaagcaccaagtcaggctcagatgcaactaaaacacatctttgagccttttctttttcccttctcccctttctaaacaaaaaccttcctaggatggcatcttttgctctaactgggagacagtcataattggttgtagtcaattctactaagcagtgttggggtggttggaaagtctcttttttgtaatttgtttttgcaaatcattgtgaggccactttttctttctttctttctttctttctttctttctttctttctttcgttctttcgttctttctttctttctttctttctctttctttcttttgctttccttctttcatctcttttttgtaatttgttgttgcaaatcattgtgaggccacttttctttccccttccttccttcctttttttctgtttttttttttttttttttcccagagtcttgctctgtcgcccaggttggagtgcagtggcacgatctcggctcactgcaccctctgcctcttgggttcaagcgattctcctgcctcagcctcccaagtagctgggattacaggcatacaccaccacgccccactaattttttgtatttttggtagggcggggtttcaccatgatggccaggttggttttgaactcctgacctcaagtaatctgcccacctcggcctcccaaagtgctaggattacaggagtgagccactgcgcctggcccacttttctttctttcttttttattttgttatgctggcagccatttgcccctgcatggtatgggatcaaagaggacagcctttcctccctcaccttctccaaatctaggtgaaatcacagagtacaaaaagtgagaatgctgaatgtgtaaagttgcagagggatccctaatttgaagactttgacacagaactaacttcttttgacttaaatgaatttaaaatgagccaaaggaccctgaaaagaagacatgttgatttcccactcctagatgctaaagagacttggcaccagctttgttcaaactgtaaaaatagcaatttgcccctactcgctcagagtgggacagtagtgaacagagctgggattccatgcgacagcttgaatgctgaccttcagacatgagacatagggatttggaggccccttagaatgggtagatggtgttatgttccctttctggcatagcattcacttggtgctttggagattaggtgagggccctataggtagttggcctgttggcagaatttatttaggaacagcccttttgaaagtgtcccagtaacaaagcacccagctgcagcaaggaggtggggaagggaggggcacccccaaagggacagcgccttcttctcttccacccatgcacggccttgggtgatgggaggcgggttccctgtggcttgcgtggatcccatagggtccaaagcccttctttttgcatggaagcagtgttgtgactcttctctctccccttcctctgcacttcctttctgtaatccctactgttcttcttagtcccagcttctgcccagggaggcttctacccagacttcttttgcaatttgtccctgggaagagggggtctcccagtgcccccagcttcatcccagcagaaccagcaggatcctcctggtctctcactggccttcctccacacttggtttctatcctcaggggtagaagctcagagctttttatggcccaggagaaaatgtagaccctgagaaacctgtccctgcagaaaggttcccttgggccatgctttgggccctctgctctttatatgtttattctattctccatttttccaccccgtccttaccctaggcctaaacacaggtacagatatgtgcatgctcagggcagctcctaggcctggactgagctctcaggggggaattagataaatattccaacatcctcatgcctggcccatttagtttcatcctttagttacccaggccagtagctttgggttatcccttcctgtagctccaaacccagcacttggagcagcaaaatagggcactgacaggagatgaaactctctcctatctcagaatttgccaacttctgggctgggctcctaggaggtagttttcttgaaggggactgcatcctagttgacctgaattttccagaccaggagggactgctgtgctctcccttctcgccatcatactgtttggctagattcattcagcagtagaagctgtttgatctgttgaccccagcatactgctgtttcttcaccagcttcattgtgtcacagtagcttcctttgggaggatgatgtgatagaacactcagagagagggagggagaagagagatagtgggtatgcttctctagctccccatcttccaggtccacctcttgacttcctgttcccctaaacctgagcacatcacgccaggccctctttgctgccaggacagcatcagctcactcctcagcaataatctagggtatgtgggaaggtcagggctgtggtaaggaatagaatcaaagaggggagtgatacgggatgggggcacttggccgcctgctaaacttggacattaattttatatcatgacccccttttaagccagtgagctgggcttcagtttttcccaggccatgcacatttaatttatttcagagaaactctaattgtattttcactgcagtatcttgtattttttatttgtgatttaagaaatgtgaagagaaaatacacagacacaataatggctaacattgtttctttcattccttgttctagagctaaccactctaaaattgtttggtaatgtcacttagtgtaattaattgtaacatattcttttaaataaattgatttattgatcaaaaaaaaaa

SEQ ID NO: 562 - DNA, 1327 bp, Homo sapiens
ttgtgctttctgacctttgcctcttttattatagagatgagaaagaagagggtatcctgggaagcatactgttacctagttttcagatagctttgcttacctctgaagatcacattaatcgcaaatatgcttttaaggcagcccatccaaacatgcggacctattatttctgcactgatacaggaaaggaaatggagttgtggatgaaagccatgttagatgctgccctagtacagacagaacctgtgaaaagagtggacaagattacatctgaaaatgcaccaactaaagaaaccaataacattcccaaccatagagtgctaattaaaccagagatccaaaacaatcaaaaaaccaaggaaatgagcaaaattgaagaaaaaaaggcattagaagctgaaaaatatggatttcagaaggatggtcaagatagacccttaacaaaaattaatagtgtaaagctgaattctctgccatctgaatatgagagtgggtcagcatgccctgctcagactgtgcactacagaccaatcaacttgagcagttcagagaacaaaatagtcaatgttagcctggcagatcttagaggtggaaatcgccccaatacagggcccttatacacagaggccgatcgagtcatacagagaacaaattcaatgcagcagttggaacagtggattaaaatccagaaggggaggggtcatgaagaagaaaccaggggagtaatttcttaccaaacattaccaagaaatatgccaagtcacagagcccagattatggcccgctaccctgaaggttatagaacactcccaagaaacagcaagacaaggcctgaaagtatctgcagtgtaaccccttccactcatgacaagacattaggacccggagcggaggagaaacggaggtccatgagagatgacacaatgtggcagctctacgaatggcagcagcgtcagttttataacaaacagagcaccctccctcgacacagtactttgagtagtcccaaaaccatggtaaatatttctgaccagacaatgcactctattcccacatcaccttcccacgggtcaatagctgcttatcagggatactcccctcaacgaacttacagatcggaagtgtcttcaccaattcagagaggagatgtgacaatagaccgcagacacagggcccatcaccctaaggtaaaatagctgctgattttgtgttaactcactaccttataaatgctgtgttttctttctagtatactattttaaatgtgagagacaaaagaatggggataaagtaagcaaggcagctcttttttgttttaaaaaaaaaa

SEQ ID NO: 563 - DNA, 827 bp, Homo sapiens
  misc_feature (1)...(827): n = a,t,c or g
tccgggtcgtcccacgcgtccgacggatcagggttccaggaactcaggatctgcagtgaggaccagacaccactgattgcaggaatgtgttccctccccatggcaagatactacataattaaatatgcagaccagaaggctctatacacaagagacggccagctgctggtgggagatcctgttgcagacaactgctgtgcagagaagatctgcacacttcctaacagaggcttggaccgcaccaaggtccccattttcctggggatccagggagggagccgctgcctggcatgtgtggagacagaagaggggccttccctacagctggaggatgtgaacattgaggaactgtacaaaggtggtgaagaggccacacgcttcaccttcttccagagcagctcaggctccgccttcaggcttgaggctgctgcctggcctggctggttcctgtgtggcccggcagagccccagcagccagtacagctcaccaaggagagtgagccctcagcccgtaccaagttttactttgaacagagctggtagggagacaggaaactgcgttttagccttgtgcccccaaaccaagctcatcctgctcagggtctannnnnnnnnnnnnnnnnnnnnnnnnnnnnnnnnnnnnnnnnnnnnnnnnnnnnnnnnnnnnnnnnnnnnnnnnnnnnnnnnnnnnnnnnnnnnnnnnnnnnnnnnnnnnnnnnnnnnnnnnnnnnnnnnnnnnnnnnnnnnnnnnnnnnnnnnnnnnnnnnnnnnnnaaggaggcaggaagggagagtcagagagagaatggaagataccatgcttctaat

SEQ ID NO: 564 - DNA, 1139 bp, Homo sapiens
  misc_feature (1)...(1139): n = a,t,c or g
acgatttcgtgtttctgccagttacacttaattttgacatatcagtcagtctggtgccggaagaacttcttagttctctttttgatgatcctgggcttcacaaggggtctgagggtggccatgatgctgaggaggagatggctgccacctccgtaggcagcgccgagagaggggctttttgttttttgagacttcaatttaaattttactttnnnnnnnnnnncttacaaaatacaaagtaaaaagaatgagaacaaaataaattttcagatacccaaaaattgaaagagttcataccaaaagacttcactaaatgaacactgaaagacgaccttcagaaaaaaacaaaatgatcctggacagtagtgtaaagatatagaaagatgaggccatgcaggtaggtaggtgccaaattatgtaagtccagcatgccaagccaaggaatcagaggctccacagggatctaaggaggttctggaaggtttccattgtagtccacatcttctatgctacaaccccatttaacaagaagttgcaagcagccaagccgcccatgaaaagctgcataatgcacaggtctccattctctcttatcagtcacactgggatccactccacttcggagcattatttgtaaagtgaaagaatgtccatgagttgcagcaagatgtaaaggagtgcatccccggtcatcctgggctgtcagatttgctccattcattataagagcctgtacacaagcatcctgacccctgattgcagctatgtgagatgctgtccaacctctcgttgttacgtgtgtgatatcagctccatgccagagcagccaatgaagacactccaaacttccagaatgtgctgcccaatgtaaaggggtaaacttatggagaacatcaagttcattaatgctggctccacgtaccactatttctgaaagctgctttacatctccagctcgtactgcatcatgtatgctgccaaaatgcaccttcttcctggaacaggggtgtgcagtctcactagagaaagtggaggggcctgaattgcccaccccgggcatggcgcaacacctccgactctggggaggagttgagtccaggcccctgatgctgcggcggtcttccgttgccgaattcacc

SEQ ID NO: 565 - DNA, 864 bp, Homo sapiens
ccccctggagctggagcagaccatccgtttccgtatagaaagtggagaaagatgagaactacgttaacgccatcatgcagctcggctctatcatggagcactgcatcaagcagaacaatgccattgacatctatgaagagtatttcaatgacgaggaggccatggaagtgatggaggaggacccttcagctaaaaccatcaatgtgttcagggacccccaggaaatcaagagggctgccacacacctctcctggcaccccgatggcaacaggaagttggcaggggcatactcctgcttggattttcagcgggcacctgtgggcatgagcagcgattcatacatctgggacctggaaaaccccaacaagcctgaacttgctctgaagccatcgtctccactcgtgacgttggagttcaaccccaaagattcccacgtactcctgggtggctgctacaatggacagatagcctgctgggacacccgaaagggcagcctggtggcggagctatccaccattgagtccagccaccgagaccctgtgtatggcaccatctggctgcagtcgaagacgggcaccgagtgcttctcagcttccacggatgggcaggtcatgtggtgggacatccgaaagatgagcgagcccactgaagttgtgatcttggacatcaccaagaaggaacagttggaaaatgccttgggggccatctccctggagttcgaatctactttggtgagtgtcccttgctgtcccttccccgacttgcattgacagggcagccagggctaaagacaggccattgctaggatatcaggtgctcgtggaacccagcaccagcccagggaggccaccctcactgcagcca

SEQ ID NO: 566 - DNA, 456 bp, Homo sapiens
gcgtggtggaattcaatcaagctagtgagtgatgtaacagctgattcaaaggtattagaagccttgaaattaaagggtttatgcaccactggtcctacccctgtgcagtcctccaactgcggcagcccggctctgccctgactccactgaaactaccttgtcaaagtcccggaggacttccaggagccgaggtgacgtacatgaacatgaccgcttacaacaagggccggctgcagtcctccttctggatcgtggacaaacagcacgtgtatatcggcagtgccggtttggactggcaatccctgggacagatgaaagaactcggtgtcatcttctacaactgcagctgcctggtcctagatttacaaaggatatttgctctatatagttcattaaaattcaaaagcagagtgcctcaaacctggtccaaaagactctatggagtctatgacaatg

SEQ ID NO: 567 - DNA, 630 bp, Homo sapiens
  misc_feature (1)...(630): n = a,t,c or g
tttttttttttttcctagagaagagacgaaggtgattcagggccgagcagggctccctgggaagccccctcttcctgccccaactttattttggttctagaatcattccagttggcatacccggtccccaccacggctgtcctgggcacacagttaacatgtcatgcagttagggggagggagagaggggagagggcagggggggagtcagtggcctgcaccgcacagccactgggttagagaaagtcggggtctcccaggctgcaaagccttgtccagccatgtgtctcctggccctgggctgacctcctgctgtggccatagggtagacagcctggccttggggctgggccatggctgtgtcaggtagggaaagccaccatcctgcctccagtcccctgggcccttgttctagcccctcctccccccatatcactggggataatttgttggcctgggtctccatagctcaccagttatggaccaaggaacaggggcagccagcctgagggtccatgctgtcacctgtgggtggccccaccgagcagatgatcggacgcctttcgaccggnattccnnccngncgncntcgaggatctcagggctcaggnnnncggcccccgttccccc

SEQ ID NO: 568 - DNA, 549 bp, Homo sapiens
  misc_feature (1)...(549): n = a,t,c or g
anagaaggcacagcagaagcatttgtgaacagcataaacgcacctgcttcagaaaggacactgtgggcaagagaaagaacacaagatttagcaccacttgagaagcactctgtaggagaaaatactatggtcaccaagactcatgaccaaccagttgaggaggaggatcggtaccagggggaggaccctgagtcaccattcacacagagtgatgaggggtcttctgaaactcccaacagcctggcttcagaggaaggcaatagcagctcagagacaggtgaactgcctgtgcaaggggactcccagagtcaaggggaccaacatggagagtctgtgcaaggaggtcacaataataacccagatacccagaggcagggaacacctggtgagaaaaacagagctctggaggcagtggtaccagcagtcagaggagaggatgtacagctcacagaggaccaggaacagcctgccagaggagaacacaagaatcaaggccccaggaccaaaggcccaggtgcagctgtggagctcaatgtacactcagatccg

SEQ ID NO: 569 - DNA, 916 bp, Homo sapiens
cgaaagggggctggaaacagggaaactggagcttggtactaagctgcttgaggtttctcagaaggggtatggcccaggaggggtggggccagaaacccctaaaccagaactgaaatgtctcactaagcagctaggaaactttatgtaagttaaacctctttcccatccacccactcaccttcagtccccaaaaagtaaaggcacaaaacatagcgtttgcccacaggccaccagttctctggggttgaggggctgatcctattgcaaagtcctaagtcagtagctgagggtaggagacggctgggagtgcagtcagggttctcccttcccaggtttgatgggtccttcttctggggtcaggtaatgaaagtcttgcggcacaagtacctcatcaacttctatcgggccattgagagcacatctcgagtatacatcattctggaactggctcagggtggtgatgtccttgaatggatccagcgctacggggcctgctctgagccccttgctggcaagtggttctcccagctgaccctgggcattgcctacctgcacagcaagagcatcgtgcaccggtgagggcgctgccacccagactggggcctttgccctcaagggggttttatgcacatctcccatttcctgtccttttttcctctttcgaactccctcctcaatatctagcctattcatgcactctattttaatcatatggtcaaggatactgataaagtactcactgtatgcaaagcattttatgaaatacaatggtgagctcccggtggtcctcagataccatcctctgtctctctccctactttgggctctgctcacaactccatggctttccttcctctctaccttgtgccatcataatggtttctacctcccacttcctctgtcctcatctttaccc

SEQ ID NO: 570 - DNA, 916 bp, Homo sapiens; identical to SEQ ID NO: 569

SEQ ID NO: 571 - DNA, 416 bp, Homo sapiens
  misc_feature (1)...(416): n = a,t,c or g
ggtacaaccagaaagtggatctcttcagcctgggaattatcttctttgagatgtcctatcaccccatggtcacggcttcagaaaggatctttgttctcaaccaactcagagatcccacttcgcctaagtttccagaagactttgacgatggagagcatgcaaagcagaaatcagtcatctcctggctgttgaaccacgatccagcaaaacggcccacagccacagaactgctcaagagtgagctgctgcccccaccccagatggaggagtcagagctgcatgaagtgctgcaccacacgctgaccaacgtggatggaaaggcctaccgcaccattgatgggcccagatcttttcggcagcgcatctcccctgccatcgntttacacctatgaccagcgacatattgaagggcaact

SEQ ID NO: 572 - DNA, 5445 bp, Homo sapiens
aagatggccgcggcgcgcacggctcctgcggcggggtagaggcggaggcggagtcgagtcactcccgcacttcggggctccggtgccccgcgccaggctgcagcttactgcccgccgcggccatgcggggctccgtgcacggatgagagaagccgctgccgcgctggtccctcctcccgcctttgccgtcacgcctgccgccgccatggaggagccgccgccaccgccgccgccgccaccaccgccaccggaacccgagaccgagtcagaacccgagtgctgcttggcggcgaggcaagagggcacattgggagattcagcttgcaagagtcctgaatctgatctagaagacttctccgatgaaacaaatacagagaatctttatggtacctctccccccagcacacctcgacagatgaaacgcatgtcaaccaaacatcagaggaataatgtggggaggccagccagtcggtctaatttgaaagaaaaaatgaatgcaccaaatcagcctccacataaagacactggaaaaacagtggagaatgtggaagaatacagctataagcaggagaaaaagatccgagcagctcttagaacaacagagcgtgatcataaaaaaaatgtacagtgctcattcatgttagactcagtgggtggatctttgccaaaaaaatcaattccagatgtggatctcaataagccttacctcagccttggctgtagcaatgctaagcttccagtatctgtgcccatgcctatagccagacctgcacgccagacttctaggactgactgtccagcagatcgtttaaagttttttgaaactttacgacttttgctaaagcttacctcagtctcaaagaaaaaagacagggagcaaagaggacaagaaaatacgtctggtttctggcttaaccgatctaacgaactgatctggttagagctacaagcctggcatgcaggacggacaattaacgaccaggacttctttttatatacagcccgtcaagccatcccagatattattaatgaaatccttactttcaaagtcgactatgggagcttcgcctttgttagagatagagctggttttaatggtacttcagtagaagggcagtgcaaagccactcctggaacaaagattgtaggttactcaacacatcatgagcatctccaacgccagagggtctcatttgagcaggtaaaacggataatggagctgctagagtacatagaagcactttatccatcattgcaggctcttcagaaggactatgaaaaatatgctgcaaaagacttccaggacagggtgcaggcactctgtttgtggttaaacatcacaaaagacttaaatcagaaattaaggattatgggcactgttttgggcatcaagaatttatcagacattggctggccagtgtttgaaatcccttcccctcgaccatccaaaggtaatgagccggagtatgagggtgatgacacagaaggagaattaaaggagttggaaagtagtacggatgagagtgaagaagaacaaatctctgatcctagggtaccggaaatcagacagcccatagataacagcttcgacatccagtcgcgggactgcatatccaagaagcttgagaggctcgaatctgaggatgattctcttggctggggagcaccagactggagcacagaagcaggctttagtagacattgtctgacttctatttatagaccatttgtagacaaagcactgaagcagatggggttaagaaagttaattttaagacttcacaagctaatggatggttccttgcaaagggcacgtatagcattggtaaagaacgatcgtccagtggagttttctgaatttccagatcccatgtggggttcagattatgtgcagttgtcaaggacaccaccttcatctgaggagaaatgcagtgctgtgtcgtgggaggagctgaaggccatggatttaccttcattcgaacctgccttcctagttctctgccgagtccttctgaatgtcatacatgagtgtctgaagttaagattggagcagagacctgctggagaaccatctctcttgagtattaagcagctggtgagagagtgtaaggaggtcctgaagggcggcctgctgatgaagcagtactaccagttcatgctgcaggaggttctggaggacttggagaagcccgactgcaacattgacgcttttgaagaggatctacataaaatgcttatggtgtattttgattacatgagaagctggatccaaatgctacagcaattacctcaagcatcgcatagtttaaaaaatctgttagaagaagaatggaatttcaccaaagaaataactcattacatacggggaggagaagcacaggccgggaagcttttctgtgacattgcaggaatgctgctgaaatctacaggaagttttttagaatttggcttacaggagagctgtgctgaattttggactagtgcggatgacagcagtgcttccgacgaaatcatcaggtctgttatagagatcagtcgagccctgaaggagctcttccatgaagccagagaaagggcttccaaagcacttggatttgctaaaatgttgagaaaggacctggaaatagcagcagaattcaggctttcagccccagttagagacctcctggatgttctgaaatcaaaacagtatgtcaaggtgcaaattcctgggttagaaaacttgcaaatgtttgttccagacactcttgctgaggagaagagtattattttgcagttactcaatgcagctgcaggaaaggactgttcaaaagattcagatgacgtactcatcgatgcctatctgcttctgaccaagcacggtgatcgagcccgtgattcagaggacagctggggcacctgggaggcacagcctgtcaaagtcgtgcctcaggtggagactgttgacaccctgagaagcatgcaggtggataatcttttactagttgtcatgcagtctgcgcatctcacaattcagagaaaagctttccagcagtccattgagggacttatgactctgtgccaggagcagacatccagtcagccggtcatcgccaaagctttgcagcagctgaagaatgatgcattggagctatgcaacaggataagcaatgccattgaccgcgtggaccacatgttcacatcagaatttgatgctgaggttgatgaatctgaatctgtcaccttgcaacagtactaccgagaagcaatgattcaggggtacaattttggatttgagtatcataaagaagttgttcgtttgatgtctggggagtttagacagaagataggagacaaatatataagctttgcccggaagtggatgaattatgtcctgactaaatgtgagagtggtagaggtacaagacccaggtgggcgactcaaggatttgattttctacaagcaattgaacctgcctttatttcagctttaccagaagatgacttcttgagtttacaagccttgatgaatgaatgcattggccatgtcataggaaaaccacacagtcctgttacaggtttgtaccttgccattcatcggaacagcccccgtcctatgaaggtacctcgatgccatagtgaccctcctaacccacacctcattatccccactccagagggattcagcactcggagcatgccttccgacgcgcggagccatggcagccctgctgctgctgctgctgctgctgctgctgttgctgccagtcggcccagcccctctggtggtgactctgtgctgcccaaatccatcagcagtgcccatgataccaggggttccagcgttcctgaaaatgatcgattggcttccatagctgctgaattgcagtttaggtccctgagtcgtcactcaagccccacggaggagcgagatgaaccagcatatccaagaggagattcaagtgggtccacaagaagaagttgggaacttcggacactaatcagccagagtaaagatactgcttctaaactaggacccatagaagctatccagaagtcagtccgattgtttgaagaaaagaggtaccgagaaatgaggagaaagaatatcattggtcaagtttgtgatacgcctaagtcctatgataatgttatgcacgttggcttgaggaaggtgaccttcaaatggcaaagaggaaacaaaattggagaaggccagtatgggaaggtgtacacctgcatcagcgtcgacaccggggagctgatggccatgaaagagattcgatttcaacctaatgaccataagactatcaaggaaactgcagacgaattgaaaatattcgaaggcatcaaacaccccaatctggttcggtattttggtgtggagctccatagagaagaaatgtacatcttcatggagtactgcgatgaggggactttagaagaggtgtcaaggctgggacttcaggaacatgtgattaggctgtattcaaagcagatcaccattgcgatcaacgtcctccatgagcatggcatagtccaccgtgacattaaaggtgccaatatcttccttacctcatctggattaatcaaactgggagattttggatgttcagtaaagctcaaaaacaatgcccagaccatgcctggtgaagtgaacagcaccctggggacagcagcatacatggcacctgaagtcatcactcgtgccaaaggagagggccatgggcgtgcggccgacatctggagtctggggtgtgttgtcatagagatggtgactggcaagaggccttggcatgagtatgagcacaactttcaaattatgtataaagtggggatgggacataagccaccaatccctgaaagattaagccctgaaggaaaggacttcctttctcactgccttgagagtgacccaaagatgagatggaccgccagccagctcctcgaccattcgtttgtcaaggtttgcacagatgaagaatgaagcctagtagaatatggacttggaaaattctcttaatcactactgtatgtaatatttacataaagactgtgctgagaagcagtataagcctttttaaccttccaagactgaagactgcacaggtgacaagcgtcacttctcctgctgctcctgtttgtctgatgtggcaaaaggccctctggagggctggtggccacgaggttaaagaagctgcatgttaagtgccattactactgtacacggaccatcgcctctgtctcctccgtgtctcgcgcgactgagaaccgtgacatcagcgtagtgttttgacctttctaggttcaaaagaagttgtagtgttatcaggcgtcccataccttgtttttaatctcctgtttgttgagtgcactgactgtgaaacctttaccttttttgttgttgttggcaagctgcaggtttgtaatgcaaaaggctgattactgaaatttaagaaaaaggtt

SEQ ID NO: 573 - DNA, 432 bp, Homo sapiens
  misc_feature (1)...(432): n = a,t,c or g
ttgccaagtagcgagaanntctagagcggccgctctgctggaagcagtaaccgagaccctgttttactacgaggtggctgagaagatctggtctaatcgggccaaccggcagtgtgcggactgtgggtcctcccgcccagattgggctgctgtcaatttgggggtggtcatctgcaagcagtgtgcaggtcagcaccgggccctgggttctgggatctccaaggtgcagagcctgaagctggacacgagtgtctggagtaatgagatagtacagttattcattgtcctgggaaatgatcgtgccaaccgcttctgggcagggaccctacccccaggtgagggactacatccagatgcgacccctggcccccggggagagttcatctcccgaaagtaccgtctgggtctcttccggaagccccaccctcagta

SEQ ID NO: 574 - DNA, 1119 bp, Homo sapiens
tttttttcacttttacaaatttaatataaagcaagtccagtcttaaaaagacaaaccatatcactccttgctgcggcaccctttctgggccaggtctcgctgggaggtagaagagggcgagctggagggggaagggacacactttgcccagtgacactgagcaaagcccacaacagtggccccatggctgccactttgaatcccaagggctcagaagtacccagcaaggcctggacctccaggcagggcgcacgggtgaacgagcagaggctctaacagtctgtgggggaaggggacagaggtgccaggagatgccctcagggttccaggaatcgctctgacacaaagtcgaagtcccggaaggcggcctgttggcgggcagtgaggaggctgtggggtgcaggtggggtcagggcaggcggcagccctgtgaaactcgccctcaaagtagcgcaggtccgcagggccacacagggtaggcacgaaggggggctggatggtgcgggcgagcagggcttgccagttggtgggcctgaaaaatggctggaccttgatctcctcggcattctggtcacctgccccgaggggcttttccgggcacttttggaggagcttctgaatgaacttcagccccttgcaccgacagaaaagccggggtagggggccgtccatgtagacgaatgcagtcaaacacctcttcctctgtgtcccctgggaacgggcactcacccaccagcatctcgtagagcagcacacccagcccccaccagtccacagcccgtgtgtatgcctcctgggtcagcacctcgggagccaggaactccggggtgccacagaaggtgctagtccggtccccgaagccgatcccttccttgcagagtccaaagtctgcgatcttcaggaatccctgggcatccagcagaaggttatccaacttcaggtccctgtaaatgatcttcttctcgtgtaagaactgcagccccaggacaacacaagccacgtagaagcgggcctggggctcggggaagacatcctcgtggatctgcatcatggggtcaccaccaggcacaaactcagtcacaaagcaggcatggctggaggtctggaagcaggacgaaa

SEQ ID NO: 575 - DNA, 2480 bp, Homo sapiens
ttttttttttttctcacttggccgactttatttttcaggaaaaacagaaaaacaaatgtacctcttgggttggaaaggacccattgacaacatggcacagacgtgagcaataaatacgcacatacattcaagtatgcgggggggcgctacgtcctggagaccctgtgttcgggcacctgtccctgctctcgggtgcggccctgcccctccagaagcaggtcacctcaccaggcccagatctgcctctccatcctagcctgagagtggggcctagaggcaccctcctagatggaactgccagccctgggggctgtggggccatggtagggcccttggcagtcttgggaggtgccaaggctgggtctggacaggaggaggcaacctcaggcccctggggcccatctcaggctccagcaggtcctgccagtcctaggatcccgaacttggtgccctgtgagccccctccccatggagagagcagtgatgtcatctcccccagctggtgggaggaggggggttctcatatggggggtctgcagggttgagctgagtgaagcctccccagcttccactgaccacccccccacttgggtgagggtcacagagcctggtgctacctcccaccctgactgggcactgctcttgctgccagtaagcatccctaggaccaggccctgccctttttcctggcttggggttttggaatgtcgaagttcatgcccagccattccctctgctttagagataggcccggctcctgtcgaggcccctgcagggccctgggactcggcggggggcacctcagggctgccactgcagcctggtctgccatgcgtggtctggggggccttctgtggttgctgacctctggccggggagtggggagacaggcttggagggagccctgccccaggacgaagctggaggggtggagcatgcctgtcacacggccatcccaagaccagctctggggggacagaacatggccctgtccttggtggccccaagaggcggctcagagacacctttggggagggtgagggagacagcagggtttcacatttggcagggcagggcagaacgggaagggcttgggggagaggatgcgggagtctgacagcaccaggtcggggccgacatgccgaaggccccgtccggcctgcggcaggggcagaagggaggaagctgagggccatgggggccagcccgggatggaagcacgccctcccaccacgggcagcttggcctgagcctgtcgccctgggtcggggaggccgtggggctgcatgcccagtgcctgtcctcggcaatggcctcgggaggacgtggctgtgactgtgagaccggcgtccaggagtgggggcagggtgggcctggcggtgggcacagggccttagctcgcaccaggctggcactgctgctggggctcgggcgggccgcctgccccctgctccgggccccccggcgaggtccacccgctgctcgtccatgcgcttagcctgcaccctctgaatgaggctgaagaagtcctcgtccggcatggtagggccccggggcagtacgtcaggtggtgggcagcgctggtcatcgatcctggaggactggtacttgatgagcatgttgaagaagtcgtcccccggctcctggggctcgccgtggcctcggaggtgccctgcattgctgtgggtgattcgcagccccggcaggctgcccacgctggcccgctggtcgtccagccggcggctctgggagctggcgatgaggtcgaagaattcctcggtctggggcgaggccgtcatcgagggctgggcgatcctgtcctccagggtgggggcggccgtggcctcggcagccccggcctggccatcgtccaggggacaacgctggtcgtccatgcggctgctctggaacttggtcaacaggtcaaagaagcactcctcgtccgaagacggggccctcgggatgctcgtgcgtggcacgtgcacccggacgtcggcgctgtccagcggggagtggctgccctcccggggcctcctctcagcgtccgggccttcctggtacttcctgctcctcacggggaggggtagcgagtccctgctgggcccccgccagtcccctgaatggtggctgtctccattctgctcccgctccagggggagtctcagcaggtcccaggtctccgcgctcagcctctgcgtcctcttgggtctggccccctgggcctcatagccggccaggtcaggcttctctgaggctgccgggctggtcaggcggccgagcaccagctgcagctgcgccacgttcatgcgggccgtgagctccccatggcggtccccgatctcctgggagatctgcaggtgcttcttggcgaaggtcagggcctgcgctgggcgccccatggacacgtaggcatttcccaggctccagcacgcccggccctcgcccactctgtcggccagctcctgggcaatgagcaggtg

SEQ ID NO: 576 - DNA, 1311 bp, Homo sapiens
ctatcagccacataccacatagggaggccacagatgggccgtggtgggtggaggtagcctttgcaccatgttgagcagagacggctggctctcctcagggctccggctggaaggtgtataccggaaagggggcgctcgtgcccgcagcctgagactcctggctgagttccgtcgggatgcccggtcggtgaagctccgaccaggggagcactttgtggaggatgtcactgacacactcaaacgcttctttcgtgagctcgatgaccctgtgacctctgcacggttgctgcctcgctggagggaggctgctggtattcctaagatccctgagagccaaggcccaaccaggatctctgccttcccccaccagaatccatggtttggcagccctccgccccatcacttcccaccctgggggatcatccagagacttggctcagggggaggtgggaagggggcagagacacatccatcctgcatttgtgcctaaaaatccctccctctgtaccagctgccactctttcttcccgggtcctccccaaccctcctccattccatccccagagctgccccagaagaatcagcgcctggagaaatataaagatgtgattggctgcctgccgcgggtcacccgccgcacactggccaccctcattgggcatctctatcgggtgcagaaatgtgcggctctaaaccagatgtgcacgcggaacttggctctgctgtttgcacccagcgtgttccagacggatgggcgaggggagcacgaggtgcgagtgctgcaagagctcattgatggctacatctctgtctttgatatcgattctgaccaggtagctcagattgacttggaggtcagtcttatcaccacctggaaggacgtgcagctgtctcaggctggagacctcatcatggaagtttatatagagcagcagctcccagacaactgtgtcaccctgaaggtgtccccaaccctgactgctgaggagctgactaaccaggtactggagatgcgggggacagcagctgggatggacttgtgggtgacttttgagattcgcgagcatggggagctggagcggccactgcatcccaaggaaaaggtcttagagcaggctttacaatggtgccagctcccagagccctgctcagcttccctgctcttgaaaaaagtccccctggcccaagctggctgcctcttcacaggtatccgacgtgagagcccacgggtggggctgtttgcggtgttcgtgaggagccacctcgcttgttggggaagccgcttccaggagaggttctttcttgttgcgt

SEQ ID NO: 577 - DNA, 475 bp, Homo sapiens
acccctcggagtgcgctggaattcgtcgactaaagaagacagacattccgctactgcagaggctcctacagggaccttctgaaaagaatgctcgcattttcctcatggataaagatgcagaagaaattagcagtgatgtggctcagtacattaactttcacttttctctcttggaatccattcttcaaagattaaatgaagaagagaaaagagagattcaaagaatagtaacaaaattcaataaagaaaaggcgattatactgaaatgtcttcaaaataaactagtaataaaaacagagacaacagtttagcagtacaagcttctattgctaaaacatttcaaaaaactcagagatattactctttgatgaatgcataagttctgtacttgcatttatacgaacatatatgagacttgaatcgtaggaaaattgaatgtcaaaaaaagctcatttctttttgaagtgatgaggtt

SEQ ID NO: 578 - DNA, 738 bp, Homo sapiens
tttcgtcccccaccgccaccaccctagtctcctagtcgtctgccaccatcccctgagagactgcaggtccagggaaaaggagcaggaacggcagcagcccggccgccgacccggaagctctttcaccgccaaccgcgaggctgcaaagggtgtgaacccggaagcgatttcatagccacggtttttggctttcatcgctttttctacatgtttttagcctcaccagaagtctttcatctcggtggtccaactcaggatctcagcctcattattttcttacccttctggagtgcatatgtgcctttacagtttctgtttgcaaacgctgtctagcatactaagaggatgttagcaaacctgttccatggacactaaatggcagttgtacatctcccctcatcagtcatagtgacaaccagaaatgccctccatattttccagtgatcccagtcttcaatgcgtctgtctcataatttgtaaacgtttattatcttgaagtcattgttaatctgtggtgaaaagtaattgctaaatagaaattctgagaagaaaaaggcctcatccttttcacatgatgtaggaaggtctgttgcatgagcaatgggaaatccagaaaacatagaagatgcatatgttgctgttattcgtccaaagaatactgccagtctcaattctcgggaatacagagctaagtcatatgaaattttgttgcatgaagttcccattgaaggacagaaa

SEQ ID NO: 579 - DNA, 396 bp, Homo sapiens
tttcgtgggacgcctgtcagcgggctcaccaaccgggacaccctggctgtcatccgccacttccgcgagcccatccgtctcaagactgtgaaaccaggcaaagtcattaataaagatttgcggcattacctaagtcttcagtttcaaaaaggatcaattgaccacaaactgcagcaagtgatcagagataatctctacttgagaaccattccatgcactacaagggcccccagggatggagaagtaccaggagtggattataatttcatttccgttgaacagttcaaagcactggaagagagtggagcattgttagaaagtgggacatatgatggaaacttctatggaactcccaagcctccagcagaacccagcccttttcagccagatccagtg

SEQ ID NO: 580 - DNA, 1741 bp, Homo sapiens
gtggtggcctaccactactgccaggctgacaacacgtacacttgcctggtgcccgagtttgtgcacagcatcgcagctttgctctgccggtcccatcagctggccgcctacagagaccttctgataaaggagccccaactacagagcatgctgagcctccgatcctgtgtgcaggacccggtggcagctttcaagaggggagtgctggagccactcacaaacctgagaaatgagcagaaaattcctgaagaagaatacattattttgatagatggcttaaatgaagctgagtttcataaacctgattatggagatacgctttcttcatttattaccaaaattatttctaaatttcctgcctggttgaagttgattgtgactgtaagagcaaattttcaggaaatcataagtgcgctgccatttgtcaagctttccttagatgacttcccagacaacaaagacatccacagtgacctgcacgcctacgtccagcacagggtgcacagcagccaggacatcctcagcaacatctccctgaatggcaaggccgatgccacactcattggaaaagtgagcagccacctggtgctgcggagcctcggctcctacctgtacctcaagctcaccctggaccttttccagaggggccacttggtcattaagagtgccagctacaaggtggtgcccgtgtctctctctgagctctatttgcttcagtgcaacatgaagttcatgacccagtccgcctttgagagggcacttccgattctcaacgtggccctcgcatccctccaccccatgacagacgagcagatctttcaggctattaatgctggccacatccagggggagcagggatgggaagactttcagcagaggatggacgccctctcctgcttcctcattaagaggcgagacaaaacccgcatgttctgccacccgtccttcagggagtggcttgtatggagagcagacggggaaaacacggccttcctgtgtgagcccaggaacgggcacgcgctcttggcattcatgttctcgcgtcaggagggcaagttgaaccgccagcagaccatggagcttggccaccacatcctgaaggcgcacattttcaagggcctcagtaagaagacgggaatttcttcaagccatctccaagccctgtggatcggctacagcaccgaggggctgtccgccgccctggcctctctcaggaatctctatactcccaacgtgaaggtgagccgtctcctgattttgggaggggccaacgtgaactacaggacagaagtgttaaataatgccccaatcctgtgcgtccagtctcaccttggccacgaggaagttgtcactctgctcctggaatttggtgcctgcctggacggaacgtcagagaacggcatgactgccctctgttacgcagcagctgctggccacatgaagctggtgtgtctgctgaccaagaagggagtgagagtggaccacttggataagaagggccagtgtgcgcttgtccacagtgccctacggggccacggtgacattctccagtacctgctgacttgtgagtggtcgccgggtcctccccagccaggcaccctgaggaagagccacgccctgcagcaggcgctgaccgcggcggccagcatgggccacagctcggtggtccagtgcttgctggggatggagaaggaacatgaagtagaagtcaatggcaccgacacattgtggggagaaacag

SEQ ID NO: 581 - DNA, 1741 bp, Homo sapiens; identical to SEQ ID NO: 580

SEQ ID NO: 582 - DNA, 1489 bp, Homo sapiens
tttcgtaaagtggagtgcacccccagccgggagcacctgaagcaccagaccgtctaccgcctgctcaagtgcgcgcccaggggcaagaacggcttcacccctctgcacatggctgtggacaaggacaccacaaacgtgggccgctatcccgtgggcagattcccctccctgcacgtggtcaaagtgctgctcgactgcggggccgacccggacagcagggattttgacaacaacaccccgctacacatagcagcccagaacaactgcccggccatcatgaatgccctgatcgaagcaggggcccacatggacgccaccaatgccttcaagaagacggcctacgagctgctggacgagaagctgctggccaggggtaccatgcagcccttcaactacgtgaccctgcagtgccttgcggcccgggccctggataagaacaagatcccttacaagggcttcatcccggaagatctggaggcgttcatcgaactgcactgacctgcccagaacgcctgcaccctcacctctcccctctcctgctgagatgggggaaatccggctgcggcatagcagatgctcgttcttgcctccttcaggcaccaatcaggagaagggttctgcctcccatcccctctacctgcagacagggtcggaggtgttagcgagcctttggtgctagaagcctgcggggtcatgtgctaagaggacagtctttctccgggagcccgctcactcattctgagttaggaaaagacacaagaccttccccacatcctgtctgcctgggttagggaggcctttgccttgttacctagaggcggagggactgaagccattgcgttccttccctgctagaaacacaggaagaagttgaggacggtctgccttccctcgtccctttacctggccagataactccagccgctgaatacagtgttaggactgggggctcctgagatgagagtttgagattcagggaatgagaccacctctcatttcttccagcatgatcgcgccctgctcccgtgccaccgtagtccctggcagacaggcagggctctgcccagggcagcctgccacttgcatagctttcggttggtttggtgttctgtttatttaataagtgggcaggttgcaagcgttgcacagaaattctgagattttactgcctttttttttttttaaaaaaagtggttggggggcccccttaaggggaatttcaacccggggggattttgggggccctgaaagggccgaggccccagggagggacctgtttgtgtgaggaatttggggagcgagaaaaaagcccacggggtcaccccttaaaacaggggggaccggccttttttatacttttccactttagggcttttaacaggttttccgattttacaggcttttccaggtttcctttttctttagagaaaagacggggcttccaaacaagattcgggagggcccccaaggcctgaaacctctttgcccg

SEQ ID NO: 583 - DNA, 5403 bp, Homo sapiens
ggcgccctgcagcttccatagccattcggggtgtgcgtggggagctgctgtagggtcccagagacagttagttatttgacctaacaacggaaaacggtcaccccaggaagagtttggtgcctctgtccaggccggttccagacctgtcttgagactctctccgtatttaagtcaacattcattcggttacacagaagttactttttaatttttaaggaggaaccagtgatgattggtgacaaatctctcacaattaaaaatgggtggaagggccaaatataaaaacattttgcagtattttattctttcgtttaagaagctataacttaaaccatcttcagaaacaagatctgtcacccgtagagcttagagtccaaatagacacctatgaggcgagcacaaggggcggtgtgaggcagctgcaggggcctgaccaggggccggggttggctgtgtcctagtcgggctggggcagccactggcccccactgccccgtggacctccacagagcgagtcatggcgacggggggacccggttcaccgccagcctcctcatgcagccgcagtaggcggggggccaggggctggcacggccatgggctcaggcaggcccccgaggtacagaggggctggggcaccagctgcagccgccagcaaggggcccacggtgtggttgctctgcgcgtccacctccagccggagcacattcccgcttttcatcaccgctagccggtgccactggccatcacacagcactgaggggcgggtcactgacgtggagaactcccctgctccgtcatccgcccgcagcaggacttgcttctcggtcacctgcaactgcaagtaggggggcgtccgggcctggcccaagtggaagatcagtccggtgactgccaggggccgcacctccagttccaggcccacatcaggcagtgtagctcctgggaggtctaaagtgataactcccccgctgcctgggaagaacaggcccgcctccagggggcccaagatgcagggtgtgacccctgccatccgtgtgggggcccccaggggcctcccgtgcagcctcagtctcttcacacagccgctgaacccgacggtcaccggaagtttggagctgtggctgctggccgggaggccgcccacaaagagggtgtggggctgggggtgctctgccccctggtgctgccggtgcggcccctcctggctccaggcccgggccccgtccgtcaccagcaggatccggttcttctcccagcgcacggagaccttgtgccagcggccaggccgggagcgctggcggctctgggcgcggagccgagtcccgaggccttccatctgtgcaacgaagtggccattgctcaggaagagcgccagggaggggctgccgggcctcagacgggcagtgaagaggaggaggcctcgggagcttcgcgggaggacgtgcatggagagactgggccagttcctatgtcgggccaggatgcccacaaactccaggtgactggacagggaacccccaaactggtaggagtctcgggtggtcctgaggtgtgggggcagcatgcaggcaggatgccgggcgggctgacggctgcggcgggaggccttccgggcggtggcctgcagtcctctaggccccaggcccggggtctgggcttgcagggcgggtgcacagcccgtgctcacattgacgctgcccaggttctgctgcagatcaaatacgcgctgtgggcccaggagccgctgcacgaagacgttgctgatgcagccactgaagttgtaaatggtgccagactcaggcaggcctcccaggaggagcctcgggggcccctcaggctgcggctggagctcggggggtggtccccggtggggcttcatctgctggagctggtcatcgacatacagccagactcccgtggcattgctgtagaaggcgacgtaatggggggcaccatcggcgaagcccgcttgagttttcacttcagtcctcaggagctgtaggctcacacggccctgctgcagggacacctggcatagcccatccggggacgcccggtagtagagcagggcactgtcctgggcgctgtggaagccgaagccggagtagacgttgccagtgagcggtgccacgttcgagagcgccaggcgaaggaagccgtggccatggaaagtcatggcgcgccccaccagcaggtcggcggtgcagccggcgctcacgcctgtcgtgttcagccgcttgaggtccacatacttgcccagggccttgatgcctttgacgcagccacggactgagcctccggtggggaagagccgtcgcaggctcgggggcagctggtcgggcggcacgccccccaggtagtaggcgtcggccagctccagatcattgtcctgctccacgctgtacaccgtggcccgctccacacgcaccagcacacgcttgcggctgccccccagcaggaacacctggatcgccttgctggccgaggtcaggggcggtgggggctgcagtgggacggcctttttcaggccagccccaaagtcatacaacagcacgaggctgccttcttgcacggccaagcacaggaactggctctgctgcttcaggaagaagagcaccccgctgtaggacacgagccgcagctcctgctcgaagcgcttggtggtgctgatctgactgtcgaagctgatgcgggcgaagccggtgccgtccaggtaggagccgtccgtgagccacgggtccccggtcgacttggagcgggcacaaggcctgtccacagccgtgtccagctggaaggtcctctcgaagttgtagaggctgaccacctcctcattcagcgtgtccatctcgatgcagccccggtagccggggaagcgaagcaggggagggggcgtgaaggtactggggtaccccccgacgtagaagacgaagtcgtctggccgcaggttgagcagcccctctgccccaggggccaccgtgtcacccttggtttcctggatcatctgtctctccactgtgacggacatgtggccaaactggagagtcctgtccaggctgacagctgcgaactgctccccaatgtcctcatcgatgcttaggactgcagggcccgcctcacccagctgatacacccagtgcaccttcttgtcacgcagagacacacccatgtagtccccagtggcctggcggctgcccatgtacatcacaaagcgatcctcggtaccctgcccaggctcaggctctgggccctgcaggtagaacttgagggcagtgtaggcagcaaggtcggcaagatcccgtggggtgcgcagctgcacccctgagcgcccgttgaacttcatgggcaccttgaccttactggcagccccccgggcctgggcaatgagctctcgcacgcggccaatgctggcggacagggccaggctggcgttgtgcaccccacggttctccaggatgctcagcttggccagcagctggggcagcgtcttctccagggtggacactgagtggcctgcgtcaagcactgcctggcccaggtcctggccccgcaggccctcgtactggccctgccaccgctccacattctcctgcatggcctgcagctgggactgcacacgggtggcggtgtcctgggcttcagcagccacagccttggcatgtgcgatcttcttgcttgtctcgtctgtgtccatggcaagcatggcctgcgccgcctggatgtgcgcctccagctggtccttcttggcccggacatctcggagctgggtcctggcaccctggagggcagcccacacaaggcccagcctctgctgttcctggagcatggcctcttctagtgcagtgctgttggccaggagctgctgggctcggtccaccaggccctgccgcaccaccgtcgcccacgtgtggtccgcctgctgcagggcctggccagcagcatcctcggcagcctgcacggcctgcaggatgcggctgtaggcgttggaggcctcgatggccctctgggtgaggcggtcctggttgacgtccaggatgatgctggacagattgagtgccagctggcccagctgctgtgcgtgggcctcggcggcctccactagacgcagcttgctgcccgccggggagaaggtctgcatcctctgcagcagtggggtccgagccccgtccaggctggcggcgaggcgctccagctcctccttagcctggtccaggctgtgcagcaatctgaagacgctggccagggtgtccctagccgcatgcagagtggcctgcagggtggcattgtcccgggacagctcctgcttcctttgcagggcttcctccaggcgctcctggttgcggctgttgagctcctgggcctcccgtgtggcgtccactgcccggttcaaagcctctcgcaggtccatgaggccggcctcgtgctgggccagccggtcgcgggtttgtgtggccagtgcctggttctcctcccagaggctgctcagctgctcctgcacccgggccagcaatctctgtgctgcagccaactcagcctcagctgctgcctgcggggcccccaggtcccgggcccgcatctcccagagcagccgctccacctcggccagtgtccggagcagctgctcacctgatggagccgaggcattggccagccccaggtggcccgtctgggacatgagctcgctcagggtgcggtccacagcccggatggccgccaacagcgtcttcgcatggcccagtgtggcctcggtgccggccagcaattggctcgcctggtctcgggtccccacggcctggccgcctagccgccgtgcgtcctgcccgaggcttgtgctctgctgctccagcacctccagctgctgtgccgtctcatggcgggggcccagggggctccggagctggctctgcaggtcagcgatggaggcgttcagcctgtgcagacgggcccaggccatggagctggcattgatgccacgcagttgctcgtgaatggcggggaggagggcgccggcccgttccaggtcatccaggagcaggaccacacagtggtcacacacttcacagtggatgctgtggcccacaggcccgcctggaacaggcacctgatgctgctggctgcaggtgtcgcagcgctccccgctgagccccggggggcagttgcagcggcccgtgtgagggtcacagcggcccccagggcactggcagcgcctgcagccctgctcagggagcccccagtagccaggggcacactcgcggcactggggtcccatggtccctggtcggcagtggcactgtccgctctgggggtggcactcggagccctcggcggccggtccacaagcacacgggcggcagcccccgcagccattgaaaccaaaatgtccctcctggcagcggtcacagc

SEQ ID NO: 584 - DNA, 789 bp, Homo sapiens
cggacgcgtgggcggacgcgtgggctgtggtctgccctgatagccaagaggactcagagacccgagcacaggaggacagtggctctgagcagcctcccgacagcgtcctgcctgacaaactgaaggtgagctgggagaaccccagcccccaggaggcccctgctgcatagagtgcagaaccgttccaggcaccctgttctgagacttctgaggctgcccccagggagggtgggaagccccctacacccccacccaagatcttatcagagaaactgaaagcctccatgggtgagatgcaggcttctgggccacctgctccaggcacagtgcaggtctcagtgaatggcatggatgacagtcctgagcctgccaagccctctcaggctgagggcaccccaggaactcctccaaaggatgcaacaacatccacagcactgcccccctgggacctgccacctcagttccatccccgctgctcctcccttggggacttgcttggggaaggcccgcggcatcccttgcagcccagggaacggctatatcgggcccagctggaggtgaagggggcctctgaacagacggagaaactgttgaacaaggtgctgggcagtgagccggcccctgttagtgccgaaacattgttcagccaggctgtggagcagctgaggcaggccacccaggtcctgcaggaaatgagagatttgggagagcttagccaggaagcacttgggctaagggagaagcggaaggagctggtgaccctctacaggagaagtgcaccctagggcg

SEQ ID NO: 585 - DNA, 605 bp, Homo sapiens
agctcgctgagggaggggatgtctttgactgcgtgctgaatggggggccactgcctgaaagccgggccaaggccctcttccgtcagatggttgaggccatccgctactgccatggctgtggtgtggcccaccgggacctcaaatgtgagaacgccttgttgcagggcttcaacctgaagctgactgactttggctttgccaaggtgttgcccaagtcacaccgggagctgagccagaccttctgcggcagtacagcctatgctgcccccgaggtgctgcagggcattccccacgatagcaaaaaaggtgatgtctggagcatgggtgtggtcctgtatgtcatgctctgtgccagcctaccttttgacgacacagacatccccaagatgctgtggcagcagcagaagggggtgtccttccccactcatctgagcatctcggccgattgccaggacctgctcaagaggctcctggaacccgatatgatcctccggccttcaattgaagaagttagttggcatccatggctagcaagcacttgataaaagcaatggcaagtgctctccaataaagtagggggagaaagcaaacccaaaaaaaaaaaa

SEQ ID NO: 586 - DNA, 516 bp, Homo sapiens
atgaaatctacttctggtgaagatgctgtgaacattattgaaatgacaacaaaggatttagaatactacataaactcagttgatacggcagcaccagggtttgagagaactgaatgtaattttgaaagaagttctactggagggacgctacagacacttccccggcccctaccgctgaggcacttccgcttccgccgccgctcgcatatttccggagtgttgtcatccggggctggagcctcaaacccgtgtccatattgtgtgtgtgaagaagcatcgaagcgcggcagccatgttcagcgtggcatttcggaaggcttgtcaggggtggagaagcggggcgggttgctgttctttcacctgacactaaagcgccatgccggaagcactgagtctgatacgtcggaaccagtctccaccgtgtggtttggtcttgatttccactggtactctggggtcttggataagtctctggacctcgcctttgtcatttgcgaagtcgataggttccaatag

SEQ ID NO: 587 - DNA, 549 bp, Homo sapiens; identical to SEQ ID NO: 568
  misc_feature (1)...(549): n = a,t,c or g

SEQ ID NO: 588 - DNA, 1141 bp, Homo sapiens
  misc_feature (1)...(1141): n = a,t,c or g
gcccacgcgtccgcagagggggatgctgagggggaggccgaagggccagtgggcagcaccctaggcagttatgctacccttacccggcggccaggacgcagtgcccttgtccggaccagtcctagtgtgaccccaaccccagctcgggggactcctcgcagccagtcctttgccctgcgggcccggcgcaaaggccccccgcccccgccccccaagcgcctcagctccgtctctggccccagcccggagccacctccactagatgggagcccagggcccaaggaaggggccacagggccccgaaggcgaacactgagtgaacctgctggcccctcagagccccctggcccacctgccccggctgggcccgcgtcagacacggaggaggaggagccaggccctgaggggacgcccccatctcggggcagctctggggaagggctgccgtttgcagaggaagggaacctgaccatcaaacagcgcccgaagcccgctggccccccgccccgagagacacccgtgccccccggcctcgatttcaacctcacggaatcagacactgttaagcggaggcccaagtgccgggagagagagccactgcagaccgcactgctggccttcggagtggccagtgccacgcctggccccgctgccccactgccttccccaactcctggcgagtctcctccagcttctagccttccccagcccgagcccagcagccttccagcccaaggagttccaaccccccttgctcccagccccgccatgcagcctccagtgccgccctgcccagggccaggtctggaaagctcagcagctagtcggtggaatggggagacagaacccccggccgcccctgctgccctcctcaaggtgcccggagcaggaacagcccccaagcctgtgtcggtngcctgcacccagctggcattttctggccctaagctagcgccccggcttcggcccccgcccagtggcctcctccacggcctgagagcactgggattgtggggcccagggcagggcccagcagagattggagcagaccagttcgttcctgggcagttgcattgagagncgcagagaagagcatttggcaccaaggagcaagaggggaaccncagcgttttcaaccatg

SEQ ID NO: 589 - DNA, 1371 bp, Homo sapiens
tggggttattgctcaaacactgtagtttatgcatataccagacctgatcgtccagaatattgtgttgtcttctgggatacgaaaaacaatgaaaaatatgttaaatatgtgaagggtctcatttctattactacctgtggagatttctgcattttggctacaaaagctgatgaaaatcatcctcagaacactggcagccaagcattgagctttgaggtgggagtttggaaatcttctcaggagaattcgacctgttcaagagaaaagccttctaaagatactgagattgagagtccccagggaaatagccctgcccatcaccttacagtaaagacgccagtcataccattgtttgttgcaatgaccaaaacccatgtgatagcagcctcgaaagaagcattttatacctggcaatatcgtgtggcaaagaagctcacagcattggaaattaatcagatcacacggtctcgaaaagaagggagagaaagccgtcttgctatcatagacatctcaggagttctgactttctttgacttggatgctcgagtaacggacagtacgggacagcaagtagttggagagttgttaaaattggaacgaagagatgtctgggatatgaagtgggccaaagataatcctgatttgtttgcaatgatggagaagacaagaatgtatgttttcagaaacttggatcctgaggaacccattcagacctctggatatatttgtaattttgaggatttagaaattaaatctgttcttttggatgagatattaaaggatccagaacatccaaacaaggattacctaattaactttgagattcggtctctgcgagatagccgagcactgattgagaaggttggaattaaagatgcatctcagttcatagaggacaatccacacccccgactttggcgcctactggctgaagcagctcttcagaaactggatctatacactgcagagcaagcatttgtgcgctgcaaagattaccaaggcattaagtttgtgaagcgcttgggcaaactactgagtgagtcaatgaaacaggctgaagttgttggctacttcggcaggtttgaagaggctgaaagaacgtatctcgagatggacagaaggaatacacttgaacttgactgtggattgggcagaactggcagtgtgaactttcacacattcctgacccttgctaaactgttcatggctctccagcaaaggcatggtataggcagcctgtctctggctaaggaaagtctgctgaatgtgaaggatcttctaagtatagaaccttggcattcagaggtatacatggtggacccagaggaaggggtccctgagttggcaattgataaggcagctgtggcatga

SEQ ID NO: 590 - DNA, 916 bp, Homo sapiens; identical to SEQ ID NO: 569

SEQ ID NO: 591 - DNA, 4088 bp, Homo sapiens
tttcgtgcctgactgctcggttaggacctcggagagcgccaggcgccgcgaccagagggcccagagaagcggccggagcccgcctacctcggccccctcagcttcccgggctggcaggcggctagaggcgtctgaggaagtgtttaaaatgaagaagtttaatttccgaaaagttttggatggcttaactgcctcctcccctggcagtggtagcagcagtggcagtaacagtggtggtggggctggaagtggttccgtacatccggcggggactgcaggggttctcagagaggaaattcaggaaactttgacttcggagtatttccagatttgcaagacagttcggcatggttttcctcatcagcccacagcattagcctttgatccagttcagaaaatcttggctattgggacgagaacaggtgctatacgaatactcgggagacctggtgttgattgctattgccaacatgaaagtggtgcagctgtcctacagctccaatttttgatcaatgagggtgccttggtcagtgcaagttcagatgatacacttcatttgtggaaccttagacaaaaaaggccagccatactccattctcttaaatttaaccgggaacgaattacttactgtcatctacctttccagagtaaatggctttatgttggaacagaaagaggaaatacacatattgtaaatattgaatctttcattctttctggatatgttatcatgtggaacaaggcaattgaactatccactaagactcatccaggtccagttgtacatttaagcgatagcccaagagatgaaggcaaactgctaataggttatgaaaatggtactgtagtattctgggacttgaaatctaaaagagcagaactgagagtttattatgatgaggctattcattcaattgattggcatcatgagggcaaacagttcatgtgcagccattcagatggtagtttgactttatggaacctgaaaagcccaagtcgccctttccagaccacaattccacatggaaaaagtcaaagagaaggaagaaaatctgaatcttgtaaaccaattcttaaagtagaatacaagacctgcaaaaacagcgaaccattcataatattctctggtgggctgtcctatgacaaagcttgtagaagaccaagtttaaccatcatgcatggaaaagcaattacagtacttgaaatggatcatcctattgttgaatttctaactttatgtgaaacgccctatccaaatgaatttcaagaaccctatgctgtcgtggtacttctggagaaagatctcattgtagttgatctgacacaaagcaattttccaatctttgaaaatccatatcccatggacattcatgaatcaccagttacatgcacagcatactttgcagattgtcctccggatttgattctagtactgtattctataggagtcaagcataaaaaacaaggatacagtaataaggagtggccaatcagtggaggagcttggatccttggagcacaaacatatccagaaattattattactggtcatgcagatggatcaataaaattttgggatgcttctgcaataactctgcagatgctgtacaagctaaaaacttcaaaagtgtttgaaaaacagaaggtaggagaaggaaaacaaacatgtgaaattgtagaggaagacccatttgccattcagatgatttactggtgtccagagagcagaatattctgtgtatcaggagtctctgcatatgtcataatttataaattcagcagacatgaaattacaacagaaatagtgtcattagaggtacgacttcagtatgatgttgaagatattattacccctgaaccagaaacaagtcctccgtttccagatctctcagcccagcttccttcttcaaggagtctttctgggagcactaacactgttgctagtgaaggagtaacaaaggacagtattccatgcctcaatgtgaagacacggccagtgcgaatgcctccaggatatcaagcagaacttgttattcaattggtgtgggtagatggtgaacctccacaacagattactagtcttgctgtaagctcagcatatggaatagttgcatttgggaactgcaatgggttggctgtggtggattttatacagaagacagtactgttaagcatggggaccattgacctatatagatcaagtgacttataccagcgacaaccacggtctcctcgaaaaaacaaacagttcattgcagacaacttttgcatgcgtggcctgtctaacttttatcctgatttaacgaaacggatccgtacttcctatcagagtttaactgaactgaatgacagtccagttcccctagaacttgagcgctgcaagtctcctacctcagaccatgtaaatggacactgcacaagtccaacttctcagagttgcagttctggaaaacgtctttctagtgccgatgtttcaaaagtaaatcgctggggtcctggaagaccaccatttcgaaaggcccagtcagcagcctgcatggagatttctttaccagttacaacagaagaaaaccgagaaaattcctataatcgttctagaagctctagtatctccagtattgacaaagattctaaagaagcaattacagcactatacttcatggactcctttgcacggaaaaatgactctaccatctctccttgtctgttcgttggaaccagtctgggaatggtgttaatcatctccttaaacctaccattagcagatgaacaaaggtttacagagccagtcatggtattgccaagtggtacattcctctcattgaaaggagctgtgctaacattctcctgtatggaccgaatgggtggattaatgcaaccgccatatgaagtttggagggatccaaacaacatagatgaaaatgaaaaatcttggagaaggaaagtggtaatgaactcatcttctgcatcccaagaaataggagatcatcagtatacaataatctgctcagaaaaacaagccaaagtcttctcactgccttctcagacttgcctttatgttcataacatcacggagacatcttttatactgcaagcaaatgtggtggtcatgtgtagcagtgcctgcttggcatgcttttgtgctaacggacatatcatgataatgagcctacctagtcttcgcccaatgttggatgttaattatttgccactgacagacatgaggatagcacgaacattttgttttaccaatgaaggacaggcattatacctcgtctctcctactgaaattcagcggttaacatacagccaagaaatgtgtgataatctacaggacatgctaggagatttgtttactcccatagagacaccagaagctcaaaacagaggctttctcaagggactgtttggtggaagcggacaaacatttgacagagaagagctctttggggaagcttcggcaggaaaagcatcccgcagccttgcgcaacacattcctggaccaggtagtatagaagggatgaaaggcgctgctggaggggtgatgggagagctgacccgtgcacggattgcacttgatgaaagaggacagaggctaggagagctggaagagaaaactgcaggcatgatgaccagtgcagaagcattttccaaacatgcacatgagttaatgctgaaatacaaggataagaaatggtaccaattctgacttctaaagaagctgtgactgctttgagaaatcatattcagggaaaccaaatttattcccagcatcactattcaactgctagaagccagtttcttctacaaaatgttccatttacagtcaatctgaaattttcataaaagagatgtatcagagacactgtgcaacccaaaggctggagccctggttaaaatcccaaaatacggctgaatttgccttttcccatgtggaatggagctatcatcttggcatgtcattcgataaggatttatatttagtaactacggggagtcctcttgatttgaaaattcctgtacaaacaaaagcattaatgcacttaatgaaaaaaaatctttgcatgataaattaacatcttaagggg

SEQ ID NO: 592 - DNA, 996 bp, Homo sapiens
atgccgtctggttggagtggcagtcccatcgactggctggcttgggacaacctggagcaaccacccctgtatcctaagaagctggtgcagacatactcagtgtttcccaaccaggacgagatgagcgatgtggtggtccagccttacaattcactcctcacactcaagaggctgacgcagaatgcagactgtgtggaaattaaggattatggaccagctaaaggaggcaagaagaaggatcctaatgcccccaaaaggccaccgtctggattcttcctgttctgttcagaattctgccccaagagcaaatccacaaaccccggcatccctattggagacgtggcaaaaaagctgggtgagatgtggaagaacttaaatgacagtgaaaagcagccttacatcactcaggcggcaaagctgaaggaaaagtatgagaaggatgttgctgtctataagtcgaaaggaaagtctgatggcgcaaagggtcctgctaaagttgcccagaaaaaggtggaagaggaagatgaagacgaggagttctgtattctacactcggctgcagagctgggaggagacttggagcctcatcccgagaaagggctgccggaggacgacccggacatcgttgtgaaaggttggctgtaccgggagccccgcggaggaggggcgcggccctggctgcccccgcgccgagcctggtttgtgctcacgcgggactccctggatcagttcagcagcagcgggaaaggggcgcggcgtctcgggagcctcgtgctcaccagcctgtgctcggtgaccggcccagagcgcaggcgtaaggagacaggtctgtggtcagtgactgtgtctggtcggaaacacagtgtccgcctctgctccccacgccaggcagaggctgagcgctggggggtggcattgcgggaagtgatcgcctccaaggcacccctggagacccccacccagctactgctcagggacatacagcctcccgagtag

SEQ ID NO: 593 - DNA, 641 bp, Homo sapiens
tcattacgcctagcttggcacgagggcaaactgcacttcagcgtctatgactttgaccgcttctcgcggcacgacctcatcggccaggtggtgctggacaacctcctggagctggccgagcagccccctgaccgcccgctctggagggacatcgtggagggcggctcggaaaaagcagatcttggggagctcaacttctcactctgctacctccccacggccgggcgcctcaccgtgaccatcatcaaagcctctaacctcaaagcgatggacctcactggcttctcagacccctacgtgaaggcctccctgatcagcgaggggcggcgtctgaagaagcggaaaacctccatcaagaagaacacgctgaaccccacctataatgaggcgctggtgttcgacgtggcccccgagagcgtggagaacgtggggctcagcatcgccgtggtggactacgactgcatcgggcacaacgaggtgatcggcgtgtgccgtgtgggccccgacgctgccgacccgcacggccgcgagcactgggcagagatgctggccaatccccgcaagcccgtggagcactggcatcagctagtggaggaaaagactgtgaccagcttcacaaaaggcagcaaaggactatcaga

SEQ ID NO: 594 - DNA, 509 bp, Homo sapiens
ccggcattcccgggtcgacgatttcgtgcagaacgcacggctcaactcatgtaattactgtttatagctggccgagcctgactaggagagggcagacccgagaggaaatcagtttcccggacctttgagaggaggctgtgtgttaattaaaggctaggacgggacgggtacttctcagacatgctccaagttgttcttgagatcacagttcccatcacattttctctggagggagtgagtagataattgggatttttttttatttttggccttggctttcttccttttttttacctctccccattttagtcatatggccttgaacccacagtgaattgaagagagaaagaaatggatatgtctgaccccaatttttggactgtgctctcaaactttactttgcctcatttgaggagtgggaacaggcttcggcgaacacaaagttgccgaacaagcaaccggaaaagcttaataggcaatgggcagtcaccagcattgcctcgaccaca

SEQ ID NO: 595 - DNA, 702 bp, Homo sapiens
  misc_feature (1)...(702): n = a,t,c or g
gtatatgatggtcacacaggatttaaggctacacttatgagttttgggccctatttctatgtctgtttcattcccattctcctgtactcactaaacaccaaggggtatggcaacccctacccctgctttccctccactcccccaaagttcccatttggccagccccgtgagagaagccagccccagccccaacctctcctccctctcccttggttctgcagggcagtcctcgcctgctgggaagggttaacaaggagtgtttgtagcagccgctgtctccaaggagaggggaggaaagcaaagtggggaggccggcagccaccccaggctctgtggccgcagccagcagagggtaggaggcagccagcttgatctctccagctctggggaaagagaggagtgtcctcacttccatctggcctcagaggggtgaactccaagtggactgggcagcctgagagcaaggttgctgcagggccaccagggaaagctctggcaaggactgaggaatgtgggggggcaggggctgggccaggcctggcagctgaagccagtggcaagtagcagcactggaggtcccgggctctcagcgagtacacgggaacctcagaatcaggaagaacccagccgagacccagcatcancgggaggaaagaggcngcanntggagaagggangtgcccacctcctgcctgctgggtc

SEQ ID NO: 596 - DNA, 416 bp, Homo sapiens; identical to SEQ ID NO: 571
  misc_feature (1)...(416): n = a,t,c or g

SEQ ID NO: 597 - DNA, 445 bp, Homo sapiens
gaaacctgtcactcttacacatcagacaaatcctaaaccccatgtgaatagtgtgggtggccataatttatatggcttatatcaaatgtccttatgaatgcttataattacataaaatttattctttcatttttatagtctgttcggcacttgaagtactccttgtttaaaaaatcactactgggcagtgtttcggataatggaatagtaactctctgggatgtaaatagtcagagtccataccataactttgacagggtacacaaagctccagcgtcaggcatctgtttttctcctgtcaatgaattgctctttgtaaccataggcttggataaaagaatcatcctctatgacacttcaagtaagaagctagtgaaaactttagtggctgacactcctctaactgcggtagatttcatgcctgatggagccactttggctattg

SEQ ID NO: 598 - DNA, 944 bp, Homo sapiens
tttcgtgtgaggggaggggcgcgtgctaaaccagaagaggtaaaccaatgcagtgagagagaggtggttgtgggctccacagcttctgatttggaggaagctgcgagaccgagagcctaggagcaccttccacgcccagggctgtggtacaggttggtgggggaggggcgccacgcggtgtttggcaggaaggggaggcctctctactgaccggaagctgcgctagaaaaagaaggaggagactgcggcgcagcagcgactagtgggagtccgatgtgggagaggggctgcggccaccgccaccgccgccgccaccaggaaggcggaggacgcaggagccaagagcaagggacgccgccacggtcatcttcgcctgccccgccgccctcttagagacactcattgcctatggatcatcctctcccagcttttgcaagcaccgggctgctcgcccgctgattttcctcctccataggctcactgcggaggcaacggcgaggtgtccgatttgtgcacttgaggcccgcaatccgggacggtggggaatctgcgcctcctggccgggcatgaagaccccgtttggaaaggcagctgcagggcagcggtccaggacgggcgctggccacggcagtgtgtctgttaccatgataaagaggaaggctgcacacaagaagcataggagccgacccacctcccagcctcgggggaacatcgtgggctgcataattcagcacggatggaaagatggagatgaacctctaacacagtggaaaggaaccgttctggatcagctcctttgaataaacctgcccaccaccaagaacccatacatgactttcttttcattgtatcaaacgaatgtgtccaccggtgtgagcaccagcaactcacttcttcctcagacatctctaaagctggacagaatatgagggacaatatcgttt

SEQ ID NO: 599 - DNA, 1271 bp, Homo sapiens
actagaggagcgttgcggaattccgaaagatctctcgccagagcaaatgggacattggagctgtgcagtggaatcctcatgacagctttgcacactattttgcggcttcgagtaaccaacgagtagacctttacaagtggaaagacggcagtggggaagttggcacaaccttacaaggccacactcgtgtcatcagcgggtgcctcccaggtcaaatggaataaaaaaaatgctaactgccttgccaccagccatgacggcgatgtgcggatatgggataagaggaaacccagtacagcagtggaatatctagccgcccacctctccaaaatccatggcctggactggcacccagacagcgagcacattcttgctacctccagtcaagacaattctgtgaagatctgggattaccggcagcctcggaaatacctcaatattcttccttgccaggtgcctgtctggaaggccagatacacacctttcagcaatggattggtgactgtgatggttccccagctgcggagggaaaacagccttctcctgtggaatgtctttgacttgaacaccccagtccacaccttcgtggggcatgatgatgtggtcctggagttccagtggaggaagcagaaggaagggtccaaggactatcaactggtgacgtggtcccgggatcagaccttgagaatgtggcggtggattcccagatgcagaggctttgtgcaaatgacatattagatggtgttgatgagttcattgagagtatttcccttctgccggaacctgagaagaccctgcacactgaagatacagatcaccagcacactgcaagccatggggaggaagaagccctaaaagaagatccccctagaaatctcctggaagagaggaaatcagatcaactggggctgcctcagaccttgcagcaggaattctccctgatcaatgtgcaaatccggaatgtcaatgtggagatggatgcggcagacaggagctgcacagtgtctgtgcactgcagcaaccatcgtgtcaagatgctggtgaagttccctgcacagtacccaaacaacgccgccccttccttccagtttattaaccccacaaccatcacatccaccatgaaagctaagctgctgaagatcctgaaggacacagccctgcagaaagtgaagcgtggccagagctgcctggagccctgcctgcgccagctcgtctcctgccttgagtcctttgtgaaccaggaagacagcgcttccagcaacccgtttgca

SEQ ID NO: 600 - DNA, 398 bp, Homo sapiens
aatacattggggggctctgggtcctgcaccatcttgctcaggatgctgtggatctgggagaacctgggccgctcacctgggtccttctgccagcagtcgagcattagtcggtgcataaggttaggacagttcctggggggtggcagccggaagccatcctccacagccttgatcacgtcttggccagacatgtcccagtaaggccgctccccaaaggccatcacctcccacatgatgatgccgaagctccacacgtcactggcagagctgaagtggccaaactgaagtgtctcgggagcggcccatagcgctgggctccggccactcatagtggtgtagacagcctctgatcggtcccgggggccccgcccgaagccagagatcttgcagacaaggtc

SEQ ID NO: 601 - DNA, 2619 bp, Homo sapiens
cggccgcccttttttgttggttttttatgggttcaaagcctttattgggtcagggcttgctccagagctcaggggccaggtaggtcaggagccttgggatggctgcagggggagggaggccgggcagcctgcggagggcctggggagacctggggctgggcgggggccggggctacggggaccccgtgggaggagctggagaggtgcaggcccagggcgtcgtccgagtgagcagcggtgctggccgtgtgggacccgggcccgcttagcaccatggacggggtgggctcacgaccctcgactgcggggcccgggcggcggcgctagcagatccagcggatgaagcggtcgaagaagccgggttgcgccaggctgtcatagtccttctcgtggaacacggcggcgcggtcacccaggctgagcgtggtgagcacgtccatgtccacgtcgctgcccaaggccagcacggtgggtaccacgttctgcttgcgcatggagtgcgccgactcgtgcagactgtcgttgcccgtgacgccgtccgtgaggaacacgaaggacagctctgcgtgcctccgggccccgccacgcgggctgcgcacgatggcattgatggcgtgcaccacgcctgcgcccacgtgcgagaaggagttcaggtattgtgtggtctccagcgcctcgtggatggccgtgaggttgtggctcagcgggaaggccacctgctgctcgccggggccaccaaactgcagcagcgccacgcgtgcgttgagagggtcgtcgtccctccgggccagcgtcagccgccgcgccacctgctccacgaagcgccgggccttgtggaagttctgctcacccagccgctcggagccgtccagcaggaagacgatgtccacgggccgctgcgtgcactgtgccacggacagctctgtttggcagggaaggtctgggcacacgatctgagggtccgggcagaggacgtcctccatgtcatcgatgaacttctcagcgaccaggtcggagaacagcgtcatgttgcgcacctgctgtggcttgtcgcaggcgatggagtagaggttttcactctcgtgcttctcgtggaacatgtccccgatgccgatggccgtcactgtgacgtcgcggtcgcacagcgcccgcaagttgaggtcatcgtcccgagggtcgtggcgcccgtccgtgatgaccaccgcaaacacacgtgtcttctggcgccggctctccttgatgaggcggtcgtaggcaaacttgagggctgagggtgtccaggtgccgcccgcaatccactcgaggttcttgacagcctccttgaagctcgacagggagtcgatacgttcgtcgtccagctggatggcctcaaaggtgccctcgtggctgtactgcaccacgcccacacgcgtccctgtctcggacttggggtccttagcgatggcacccagcctgttgaccacgttgatgacgaagttcttctccagtgtgaagttggtgtacccaatgctctcggagctgtcgatgacgaagaccacgtccagggcgccacagcgcttctcacagtcgcagcacccgcaggtctccctcacgtaggtcatgacgtcacactccgtgagaccggggtctccaggggggccgggctcaccctcgggtcctgggactcctcttggcccccgagggcctggctcaccagggggaccaggatccgcaggctctcctttctctcctttcctcccaggttctcctttcaagccaaagtcgcctcggcctccctcggggccgcgtgggccgggctcgcctttttctccgggtgctcctcggggtcctgggtagctgaatccaggcctgccggggtctcccttggggcctggctgtcctgagtctccacggggtcctgcatcaccggggtctccccgagatccctgctttccgggctccccaagagctccctgggggcctctgggtccaggcaagcctcggtctcccttggctcctttgttgccaacctctccagccaggccgcggggcccctcagggccagggtcccccttctcccccttggggccatcgctgcctgggctgcccttggtgccggggtctcccctgcgccccggctcgcctttgggtccgcggggcccaggcccgcccttggctcctttcacaccaggacttcctggggctccattgttgccttgataccccttgcttcccttggccccgatttctcccgggggccctctgcgtcctcgggggccaggggtcccccttgccgccttggtctcctcgctcccctggactccctgcttcccccgggtaaccgtcggggccccggtttccagggtctcccttgcagccaggaggtccgatgcgccccagcttgcccttctgtccatcggtcccgttcttgccagccaggccaggggcccccttgcgaccgtcggctccaaattcacccttctctcctttgaagccaggaacgcccttggggcctgggaatccaatggggccctcgatgccccggtctccctgtcttcccttctggccaggctctcccggctcacccatgttgcccttggcacccttctgtccacggtagcccttgggcccagagggccc

SEQ ID NO: 602 - DNA, 1057 bp, Homo sapiens
cccacgcgtccgagaactcaaagaaattctggataggaaagggcatttctcagagaatgagacaaggtggatcattcaaagtctcgcatcagctatagcatatcttcacaataatgatattgtacatagagatctgaaactggaaaatataatggttaaaagcagtcttattgatgataacaatgaaataaacttaaacataaaggtgactgattttggcttagcggtgaagaagcaaagtaggagtgaagccatgctgcaggccacatgtgggactcctatctatatggcccctgaagttatcagtgcccacgactatagccagcagtgtgacatttggagcataggcgtcgtaatgtacatgttattacgtggagaaccaccctttttggcaagctcagaagagaagctttttgagttaataagaaaaggagaactacattttgaaaatgcagtctggaattccataagtgactgtgctaaaagtgttttgaaacaacttatgaaagtagatcctgctcacagaatcacagctaaggaactactagataaccagtggttaacaggcaataaactttcttcggtgagaccaaccaatgtattagagatgatgaaggaatggaaaaataacccagaaagtgttgaggaaaacacaacagaagagaagaataagccgtccactgaagaaaagttgaaaagttaccaaccctggggaaatgtccctgagaccaattacacttcagatgaagaggaggaaaaacaggtaggaagaatcattgctgcatttctcccaagtgtaaaataccctcaccacacctggaacatttttttgcaaatctgtctttttgttgttagtttgtaacaaaggccgagcgttatatagcaagtaaagttctttctgccttataaggctagcatgatttagcgaggtggcctacatgtttattttaaggttggtgattatgtagggcaggtgtctgcaaactttttctgtaagggaacaaacagtaaatattttaggctttgtgggccctagtagtctttgtcacaactactc

SEQ ID NO: 603 - DNA, 1228 bp, Homo sapiens
ctgcaggattcggcacgagaatacagcgagctcctggacaaggcttcggaaactgatgatccatatgagcgcatggttctcgttgccgcatttgcagtttcaggatactgctccacctatttcagagcaggaagtaagccattcaacccagtccttggggagacttatgaatgcattagagaagacaagggattccgctttttctcagaacaggttagccatcatccacccatttctgcctgtcactgtgaatcaaagaattttgtgttttggcaagatatcagatggaaaaacaagttctgggggaagtcgatggaaatcctgcctgttggaacactgaatgtcatgcttccaaagtatggagattactatgtgtggaataaagtcaccacttgcatacacaacatcctcagtgggagaagatggatagaacattatggagaagtaaccatcagaaataccaaaagcagtgtttgcatttgcaaactcacatttgtcaaggtgaattattggaattctaacatgaatgaagtccagggggtggtgatagatcaggaggggaaggcggtgtaccggctgtttggaaagtggcatgaaggactctactgtggtgtggccccctctgcaaagtgcatttggagaccaggttccatgccaacaaactatgagctgtactatggcttcacaaggtttgctattgagctcaatgagttagatccagtactaaaagatctccttccaccaacagacgcccggttccggccagatcaaagatttttggaagaaggaaatttagaagctgcagcatcagagaagcaaagagtagaggaactccagagatctcggagacgatatatggaagaaaacaatcttgaacatataccaaaattttttaaaaaagttattgatgccaatcaaagagaagcctgggtttctaacgacacctactgggagcttcgaaaggaccctgggtttagcaaagtagacagccctgttctttggtagactgggaatgtagagctagccaacatatcacattctgaatgaataaataactatgcacaattatgtttcttatagctatgtgtggtttctgggtcgactgaaaacctaccatttgcttttctattcatctttataatggactttcagaagtgcattagacaaggcccctaaccactttgggatcctttctgttttgctgcaaccatattccttaaaaaaaaaa

SEQ ID NO: 604 - DNA, 3038 bp, Homo sapiens
ccaaacactagttcccctagtagagccagcctatgagaagaaaagctttgttggccaagttcttacattaatgacttcatagtaagaaactgatttcaaagtgaattaaggaaatcatcacagagaatattttcaaacagatgtttctctttttaaaaagtgatagtaagatgaacttgtaaaaaatttcctctgatgttaattgtagagttgtgggggacggcctatttttctctaccgttgggactggcagggcattgcccaccatataccatagtggtcaccaaaaaagaaacctcttcaacttgaaaagggaagtgaacatgagccatgagagagatttaaaagacccctgtgcttgcagttaatgccacgttgattgattatctgtgcttcaaaggtcacagaaatcttaaaggatttttagcaccatgtagatattgtcttttgtcctgctttataaaaagcgttgctataatgtattagtgggttctcgtgtctccaaattaccaccgtggctaggctgctggaaaaaagcactgttctgttcacttcaatctcctggtagactctgttggtctatagacttctgtgaagccagtgggtttctactaataaccaggtccagcttattcccggattctgctatgaggggcacaacaaggcagcagtcaaagtctctggttcggacatgattcacctgtaagagcctgtcatagggctttaagccaccaagatctcctggcccagctgggcgaatatttttgacatacactcctttctccagtaagccatctgctacactgaacccaaagtcctccatgtcagagtccttgtacaaggtcaccttgtgcagctccacaggagttggagacatgatctcctttatttcttgtttcatttttctcagggttactgacttcctacccacatctgaaggcagggtgttgctccgagttgtttggctgtagtgcggccgcgagctgctgcgctcctggaagctgggcctgtcgctcccagctggactgcgaggtgttggagcctcatgattcaaactcatcgtgctccccgacatgattgttgcctccagttctctcagaattcctgactgtccgcaggtttccaaatcctccagcgcttgagaccagaagttctcctcttgttctgtctctgcactatcgggcagcccctgcaaaaccactggctgtggaccggtcccagtcttcataactcagccccacatctgggtaagtctggcttcgaggcttaagtgactggggacaaagctgcctctctgttttggactcctccagtcataggtgttgaaatttgtatcctgaggcctgaaaactaagtgccttcagttccataagctggtgtctattggcagacccatcccatgaatccacagcactgtccacactggggcacccgtgggaggggtacatgtcggagagcttgcctggcttctgtgctggtgaggagtcctcctccacatcccccaggtcactcaaatggctagaaatagggaacttcttggggctcgatgctgactgggcatctgtctgtttcttaattttcaaggtgacagtctctcctgccatctgtaacaaatggatggcttcactcagaggcttccctttcaagctgctgctattgatggcctaggattcggtctcctatgtggattgcgccagttctttcagctaatccccccttagtgaggcttgaaatgatttatagatcaaaccggctcttcagttcctgaaattgtgatgcccaaggggccccccgtagcgtttaagctccacggtgtaaataattgctccggaactttcttgctcatctgaattatcttcatctttgcggattttgagcttcaccaggtcttcacattgctggaggatctgaactgcatcttccatggaacagttgtccagccggatattatctattgcgagcaatttatccccaagttccagggtcccagttctgtgtgccacactccctttcttgatatctgaaatgacgagggggtctcctggttttctactggatggtgaacttatggttattccaagttccacattgtgcttcttaggcagctttacatgaaatgttccactacttgggatgacagactctgcaacatcaaactcgatttccagtgtgaccttgctcgtgattgaagagtctcggaggagctgactggcttcttcgaaggtgctgtcttctgttggaattccattgatggccatcactctgtctccaatctgtagcaccccacatctctctgctgggctgtcagcttcgatataggaaatcagaggtggagaagagagagtttctgtggcaaacacactgccctgcagttggatcccaaatcctgtgacaggatctgccgtcagaacaacctctgtggtttctgtgtgaacaacctgcccagccaatcctactgtgctggaggctaaggacaatgagcttttgaagtctttctttttcagtctcctcctcatcatggttccacgtgggctggtggagtagaggcttcgaggtagagtccccatgttcagggaactcaggctgtatgcactcatggaggtaggagagaaggatgaagacaccaaagctggagggctgtttggaggaggtgctttcgggaatgtcagggctggtactctgcaatggtcagggtggtacgtgttatagtgatggttggtgtgaaggctgctgtggttgctggcccaggaatcccaggtaagttgcctgtcgctcctctgaattttcacatggtcgggcccctttagggccagccgggtctgatgatggggaaggatctcaagcttgacctggtcagtggtgttggccaggaactgggttgcttctgcaagtgtacagtactccatgctggttccatcgatggagaggatgtgatctcccacatgcaatgcgccacatctgtctgcaatacttgcagatttgattttgtctatgacaatgacttgtttgttacagcacatcgaggtagttagggcaac

SEQ ID NO: 605 - DNA, 1741 bp, Homo sapiens; identical to SEQ ID NO: 580

SEQ ID NO: 606 - DNA, 1021 bp, Homo sapiens
ttttttttttttaggtgtttaatatttatttatttagttcataaacaggcactgccacctccagtgttcatccatggcactttcatgaccgcttcctgttctgtggcttcttttagtgcccaagttgtatcacatttcttgctgaagttcagacaattgaaaacaaacagactcacatctagggaaatcaacagaccaacaatggcaaaacacaatacaatgaaatggaaaaataatgtttgttacaggagtgcagcaatttagagagtgtctcaggagtgtggctcactggcagctgcagctatgttagtgcttctttctgcctcaagttcagaaacaagctggactatctcagggtgattgaattttcctgctgtggaatcatagaagtcttgcagtctcccaggtttgtgttcaaggtcttcatattcagatgcttgaagaatcatttcacattggtctagctgcttcacaaatttggcttctgcactagattgggtctcgtactccatatatacttacttcccaaagttcatagagctcctttctgaggtcctctggtaggagctgggttatctgcttcatagcttcctcttctcgcctatgtttttcttctttggggatgttatctgctggtgctatgtccccaacgatgcattctgccatatcatgaaccagggctaggcgtacacatcggtctttgttaagacggtcatctttgatcaccatagccataactgccatccggtacatgtgatctgaaacgctctccggcctctggacatttctgtatacccagccagttcgtgggactctcttgagctgccctaccagccgcaggaactgcagtagggaccgagccccgtggcccgagaaggtcgcagaggagaccgaagccatgcggccaccgaccccggctgggcggagcaggccgcggcgaagctcctccccgtcctcctcctcctccccttccccttgtctttcttccccctcctcttactcttctatctctttcacgaaa

SEQ ID NO: 607 - DNA, 454 bp, Homo sapiens
ctctgtgaaaagacaacctggctttgggcagacaactgctaaaagacaccctagccaaggacagcaggctgtggtcaaagctgctctcagcatcttgctaaataaagctgtactgcatggctgtcccctccccagagcagagctagaccagcatacagctgatttcaaaggaggaagtttccctttatccatagtttccagttataacacttgtaacaagaagaaaggagagagtggtgcctggagaaaggtgaacaacagtcctcgcaggaagtctggccgcttctctttacccacctggaataagccagacctaagcactgaaggtatgaaaaataagactatatcacagctgaattgtaacaggaatgcttctctgtcaaaacaaaagtctttagagaatgatctatcactgacgttgaatttggatcagagactctctctgggttcagat

SEQ ID NO: 608 - DNA, 1349 bp, Homo sapiens
cggttcggggctgtaccggggacccacgccaggtggccagtgcatctggaaacccaactcaatgccccccgaccatgagcgaaacttcggcttcacccagtttgccttggagctgaatgagctgacagcagagctgaaacggtcgctgccttccaccgacacgagactccggccagaccagaggtacctggaggaggggaacatacaggccgctgaggcccagaagagaaggatcgagcagctgcagcgagacaggcgcaaagtcatggaggaaaacaacatcgtacaccaggctcgcttcttcaggcggcagacggatagcagcgggaaagagtggtgggtgaccaacaatacctactggaggctgcgggccgagccaggctacgggaacatggatggggccgtgctctggtagccctggccccgggggcaggaggctctggttcctcactcctcctgcctccaccccctaccatggacacatgggtgaggccgggctccccgcctcactgcccttgagaccaaaggggcagccctggccctccctcccctctgctggccagagggtctgcatctcagcccacccccaaccccaccgtttggggtgagaagcagaatctgtgcttccccagtctccttgccccagacaaccagcatgtaagacccttcccgcttcaccattccgattcctgtcccctttggggtacttgggggagactctggctcccaggatctgttccctatttcagtgccttcctaggacacaggggactccttgacgctccccaggctttctgtgcccaggcctctgtccccagcggtgaggttgcagtgagtgaaggagaggaggtgatctgttctccctccccttctgcccatctccagcatcttcttccccttccctggccctgcagggccttctccagctccctttggttagtccctggccatccctcctgtcctggatcccttctccctaactgcaaaatgcctgcagcttccagctccttcgtccctgatcctcaagcggttccctcccgtctcagctcagcggatcccccagagtggaggaggcctctccatgaggaggggagcagcccaaggcacctgtcctctgacccaccggcagcgagtgcgcaggtgtgagtgtaagttcatgtaggagagtgtatgcgtgtgcgcctgtgccctgcttgcaggcaagcagggctccctcatgtagcccggccttccccctgctgggggtccaccacatcgctgctctttctcacagtctgcctctgatgagggcgaattgctatgacattccaagctccaataaagactgtcccagactttgaaaaaaaaaa

SEQ ID NO: 609 - DNA, 691 bp, Homo sapiens
ccggaattccggtaacgtttcgtagaagaccgaattccttaccaagacagagagagttacagtcagcctgcatggcatcatcgtggacctccacagcgggattggaaatgggaaaaagatggctttaataatactaggaaaaacagctttccacattctttgaggaatggtggtggaccaagaggacgttccgggtggcataaaggtgttgcaggaggctcctcgacttggtttcacaaccatagtaattctggaggtggttggctttcaaatagtggagcagtagattggaatcataatggtacaggaaggaattccagttggctttctgaaggaacaggtggcttttccagttggcatatgaacaacagtaacggaaactggaaatccagtgtacgtagtacaaataattggaattacagtggccctggagacaaatttcaaccaggcagaaacagaaattctaactgtcaaatggaagacatgactatgctatggaacaagaaatctaataagtcaaacaaatacagtcacgacagatataattggcagcggcaagaaaatgacaaacttggtacagttgccacatatagaggtccttctgaaggatttacaagtgataaatttccttcagaaggcttactcgacttcaattttgagcagctggaaagccaaaccactaaacaagcag

SEQ ID NO: 610 - DNA, 522 bp, Homo sapiens
agaggtggtgtttcagatatgctgatcaaagttcaagccacggaacaaatgggttactgccccatacagtgtgaaaagttgtgctatttgcctggaaactccaagtgcagcagtgtatatgagaactgtttagaacaaagcagggcaataggtaatgtccatccaagaggggtgcagtcccagcgagatacctcattattgaagcacacgtgccgagtggatctctttgatgacccctgctacattaatacacaggctcttcaaagtacacctggctctgctggaaatcaaaggtcagcccaaccactggggagcccatggcactgcggaaaggcaccagaaactgttcagccgggtgccacagcccagcctgccagctcacattctttgccacacattaagcagcagctgtggagcgaagaatgctatcatggcaagctgagcaggaaggcggcagagagcctcttggtaaaggatggggactttttggttcgagagagtgcaacatcccctggccaaaat

SEQ ID NO: 611 - DNA, 840 bp, Homo sapiens
ctcgtgtggtggaattcgaagccttcaacatggactctgcctactcagaacaagctgcggtgctcctgcagaggagcaggccatcccggggaggcacctctgcctggggcaagtgttccctgccgaagtttaccgtccccaaaggcagacttggcgtgacgaggataggagacttgtccctgcaggatatgaggaaggtaccttctctggccctcatagagctgaccgcgctctgtgacatcctcggcttggacctgaagaggagcaaggcggggaagtggaaagcggcagaaactcgcctctttggtgtgccccttgacagcctgctagaagctgaccacaaagtcctccccagcacacaggtcccgctggtccttcaagccctgctgtcctgtttggaaaagagaggactggacatggaaggcattctcagggtgcccggatcccaggccagggtcaaggttcatccggaagctgccgacacctttgctcacggctgagtacctcccggccttcgccgtggtgcctaacatccccaacctgaagcagcgcctgcaggttcttcacctgctcatcctcatcctcccagaacccaacagaaatgccttaaaggcactgctggaattcctcaggaaggtggtggcccgggaacagcacaacaagatgactctgaggaatgtttccaccgtgatggcccctaacctctttctgcaccaagggcggccccccaagctccccaaaggcaaggagaagcagctggcagaaggggcagccgaggtggtgcagataatggtgcactaccaggatctgctgtggacggtcgcctctttcctggtcgcc

SEQ ID NO: 612 - DNA, 350 bp, Homo sapiens
ggcacgagcaagataaaaataaatacaacacacccaaatacaggatgatagttcgtgtgacaaacagagatatcatttgtcagattgcttatgcccgtatagagggggatatgatagtctgcgcaacgtatgcacacgaactgccaaaatatggtgtgaaggtcggcctgacgtattatgcttgtacgtatagtactgtcgtgctggttgctcgcacacttctcgatacgtagtgagctggactcagctgattactagtcactacgctctaagttgtatgggcacactatttgtactattaacgacggagctactataccaggaagcggatctgttctgccgttctgctg

SEQ ID NO: 613 - DNA, 1158 bp, Homo sapiens
tttggagaggccttatggtaatgtcggccattgagaaattgttgaggcaggtagattggggtcaactggactacttagttgtagacatgccaccaggaactggagatgtgcagttatcagtctcacagaatattcctataacaggtgctgtgattgtctccacgccccaggacatcgcattgatggatgcacacaagggtgctgagatgtttcgcagagtccacgtgcccgtccttggccttgtccaaaacatgagtgttttccagtgtccaaaatgtaaacacaaaactcatatttttggtgctgatggtgcaaggaaactagcacagacccttggtcttgaagttctaggagacattcccttacaccttaatataagggaagcttcagatacaggccagccaattgtgttttcacagcctgaaagtgatgaggccaaagcttacttgaggattgctgtggaagtggtaagaagattgccatcaccttcagaatgattccccaagtgtcctggaaatttgcctggtactgacattaagaggacctttggaaatcagcaatgtggtgatggaacctacagaaataatagaaatcataactgttttatttctaaggaaagaatgtcttcatatttgacttgctaagctaaggttcacaaaactttgatgtatcaatgttaactgctatatttaggaattttttgaaagctggtgtgtaccacctgcaaagaactgcattttattttattgaattacccctttagaaatcatgagtttatgatgttacaagtccattttgggagagaactgtacactttttgcaggaccacagaattagtaatttaaatgatatactaaatttgtgtatgggcataagtattacgccttcccaccaggcaatttggactgtctttgaatcctgtctttggtactgtcttggacatgttcttaatatgaacctctgcttcttcatctggatcacactataccccaaacttaatgaatttcagtctccaggagtggagcctgaacatatgtatttttagtaagaccatgatgatgttgatgatgattctggtaatcatggcagtaagaataatagctaacatttaacaagttaattataattgttcttccatttgtgtgagcgggtactatt

SEQ ID NO: 614 - DNA, 564 bp, Homo sapiens
ttttgcctttcacaggaatgttttattgtctctgcctggacttctaacatagcatatgaggtgaaaacactgctttagtaaaaatggaatactcttggttacatgaaatcccatccctcgtccttcaggtccactggaggagaagtccctcattccttgggattggtgacgacagccgtggtggaataggagtaggggctcagcagggcggcaatggtgtggtggcagcaggcgcagcccagcctcgaaatgcagaacgacgccggcgagttcgtggacctgtacgtgccgcggaaatgctccgctagcaatcgcatcatcggtgccaaggaccacgcatccatccagatgaacgtggccgaggttgacaaggtcacaggcaggtttaatggccagtttaaaacttatgctatctgcggggccattcgtaggatgggtgagtcagatgattccattctccgattggccaaggccgatggcatcgtctcaaagaacttttgactggagagaatcacagatgtggaatatttgtcataaataaataatgaaaacctaaaaaaaaaa

SEQ ID NO: 615 - DNA, 970 bp, Homo sapiens
cggcacgaggaacggtcaatttgagccgcgtcgaggtcgggcttgggaagggtcagcgggaggcctgagggcgccgggcgctgcggcaggcgggcccggggtccagccgagagggtccgggcgccaggcaacgcgattcgcgcgggggtgaacccggggagggggccggcctccccgttctgggacctttcgctcccctgggacctgtggccgccgcccacagaccatgctcctggggcgcctgacttcccagctgttgagggccgttccttgggcaggcggccgcccgccttggcccgtctctggagtgctgggcagccgggtctgcgggcccctttacagcacatcgccggccggcccaggtagggcggcctctctccctcgcaagggggcccagctggagctggaggagatgctggtccccaggaagatgtccgtcagccccctggagagctggctcacggcccgctgcttcctgcccagactggataccgggaccgcagggactgtggctccaccgcaatcctaccagtgtccgcccagccagataggggaaggggccgagcagggggatgaaggcgtcgcggatgcgcctcaaattcagtgcaaaaacgtgctgaagatccgccggcggaagatgaaccaccacaagtaccggaagctggtgaagaagacgcggttcctgcggaggaaggtccaggagggacgcctgagacgcaagcagatcaagttcgagaaagacctgaggcgcatctggctgaaggcggggctaaaggaagcccccgaaggctggcagacccccaagatctacctgcggggcaaatgagtctggcgccgcccttcccgcccgttgctgctgtgatccgtagtaataaatgatgtcctctccaatggctgtgctactgcatggactgtatactcgatttcatgtgtatgtcgcagtaaacaaaaccaaacctcaaaaaaaaaa

SEQ ID NO: 616 - DNA, 970 bp, Homo sapiens; identical to SEQ ID NO: 615

SEQ ID NO: 617 - DNA, 970 bp, Homo sapiens; identical to SEQ ID NO: 615

SEQ ID NO: 618 - DNA, 692 bp, Homo sapiens
ggccgggttggaaaacccagcaacgagctttgaaaacatatcacccggacaccaggggcagaggctgttctgggcgggaggttgtgcctgccccacggagcgacagaagcggggagaccagacgtcgaccctgaggcgtgcctcctggggggctccagtggccggcatggggtgggtgtggactctctgcactgctagtgcctgcctgaccttgctgttctggagccagaccccagggaaagcattccagatcccgtgccccccaccacacctttcccattggtgcttgtctcctatgcaaatggatgatggttgtgctcggctttgcgtgttgtggacggcgtggatgagatggagggtgctcatgtgctcttgtcgggtgtgggccacagatcttgggatcttccttggcgtggccttggggaatgagcctttggagatgtggcccttgacgcaaaatgaggagtgcactgtcacgggttttctgcgggacaagctgcagtacaggagccgacttcagtacatgaaacactacttccccatcaactacaagatcagagtgccttacgagggggtgttcagaatcgccaacgtcaccaggctgagggcccaggggagcgagcgggagctgcggtatctgggggtcttggtgagcctcagtgccactgagtcggtgcatgacgagctgctcg

SEQ ID NO: 619 - DNA, 692 bp, Homo sapiens; identical to SEQ ID NO: 618

SEQ ID NO: 620 - DNA, 2548 bp, Homo sapiens
cggaagccttctctggggctgcaaggacctgagctcagcttccgccccagccagggaagcggcaggggaaagcaccggctccaggccagcgtgggccgctctctcgctcggtgcccgccgccatgtgggccgtcctgaggttagccctgcggccgtgtgcccgcgcctctcccgccgggccgcgcgcctatcacggggactcggtggcctcgctgggcacccagccggacttgggctctgccctctaccaggagaactacaagcagatgaaagcactagtaaatcagctccatgaacgagtggagcatataaaactaggaggtggtgagaaagcccgagcacttcacatatcaagaggaaaactattgcccagagaaagaattgacaatctcatagacccagggtctccatttctggaattatcccagtttgcaggttaccagttatatgacaatgaggaggtgccaggaggtggcattattacaggcattggaagagtatcaggagtagaatgcatgattattgccaatgatgccaccgtcaaaggaggtgcctactacccagtgactgtgaaaaaacaattacgggcccaagaaattgccatgcaaaacaggctcccctgcatctacttagttgattcgggaggagcatacttacctcgacaagcagatgtgtttccagatcgagaccactttggccgtacattctataatcaggcaattatgtcttctaaaaatattgcacagatcgcagtggtcatgggctcctgcaccgcaggaggagcctatgtgcctgccatggctgatgaaaacatcattgtacgcaagcagggtaccattttcttggcaggaccccccttggttaaagcggcaactggggaagaagtatctgctgaggatcttggaggtgctgatcttcattgcagaaagtctggagtaagtgaccactgggctttggatgatcatcatgcccttcacttaactaggaaggttgtgaggaatctaaattatcagaagaaattggatgtcaccattgaaccttctgaagagcctttatttcctgctgatgaattgtatggaatagttggtgctaaccttaagaggagctttgatgtccgagaggtcattgctagaatcgtggatggaagcagattcactgagttcaaagccttttatggagacacattagttacaggatttgctcgaatatttgggtacccagtaggtatcgttggaaacaacggagttctcttttctgaatctgcaaaaaagggtactcactttgtccagttatgctgccaaagaaatattcctctgctgttccttcaaaacattactggatttatggttggtagagagtatgaagctgaaggaattgccaaggatggtgccaagatggtggccgctgtggcctgtgcccaagtgcctaaaataaccctcatcattgggggctcctatggagccggaaactatgggatgtgtggcagagcatatagcccaagatttctctacatttggccaaatgctcgtatctcagtgatgggaggagagcaggcagccaatgtgttggccacgataacaaaggaccaaagagcccgggaaggaaagcagttctccagtgctgatgaagcggctttaaaagagcccatcattaagaagtttgaagaggaaggaaacccttactattccagcgcaagggtatgggatgatgggatcattgatccagcagacaccagactggtcttgggtctcagttttagtgcagccctcaacgcaccaatagagaagactgacttcggtatcttcaggatgtaactggaataaaggatgttttctgttggacatgtactgaaaattaacacatgtagtagccttaaaattttagacttctcgaacatgaggctgttacagtaatttttttaacactgtgcattgtacttttctaccttaaaaaaatcagtgaggatatttatttaatgaacatcaattccttttaaattttcttagagaaatttctctgtggctcagttttaccacccataaagcggagacagtaatttatggttatcctttctgacccacaaagtatgaaaagttctgtaatctgtaaactcagttctgtaatctgtattattgagatgattaatataaagttgtattttcactgaaatgattgttttgctggttatgcttggtgatattttagcgggcttatttttgaaaggcatctgttacttcagtggcataaagtgccctcacactgctgtgcagccatcaccaccattcatctccagaatttgttctcagtcccaaactgaaactataccattcaaacaacagcgctccccatttccccctcccccgagcccatgacatctccttattattattttttttttgagacagggtgtttctctgttgcccaggctggagtgcgggggggtgatctcggctcactgcaacctccgccttccaggttcaagcgattctcccacctcagcctcctgagtagctggaattacaggtgcccaccaccatgtctggccaag

SEQ ID NO: 621 - DNA, 1731 bp, Homo sapiens
ttttttttttttgagatcatctactcaaagtttattggactgaacaaaggctgaatacagagatccaagccatgaggagtacatgaggtgtggtgcctataagccagggtcggaaactttccagacaaacctagatagctctactaggagggagtcaacgacctattgtatcaattagatcccagcctggacaagggcatgactattgctgtttggggacacgtggctctgtgttgaaggcaatgactgtgtggctgttgccatgtggcctgttctcccctaagccctgaaccaaaggttccaggcccagatgagaaggccactgggaatgcatgccataggggttgatgctggacattccccagccttccattaaatgaaaacattttctataaacttactgctttaaaaaaatgttttaaccaacaaacctaagaactgcaaatgagtttggtatagtataaatattgtcaaatataaaattccaagaaacccatttgagactgatctgatgatctgaagttctaactaatctatcaaactttctaagaaaaggcataggtcaagaaatctttttaaagcaaacattattgcttctgctatagcagagtggagatttggctgagctggtaagaacctcagtgaaaaggtgtcttagcaatgaaagggctgaatccgagattcctctagatgaaaaataaggggaatggtcaagtaaattcctggtactggttctttgctgccctgtaatcaatatggcatctcacccccgacaaccaagccagccacagagagaagtggggttcccagggaaaggggtcggctgaccaccctgacggagctggtgagcacaggtgagctctacctcatttgtctctcattcctcaaagtcttctgtggtttggcttcagtgagggcaaaagaggggagactggagtgaaagtgaactctgcttttaaaatgttctttttatctaaggtgtgcagggtgtgtggatagcaagtttgagtggtaagaaaaatcccagtccagggtctgagctctacctcttaaaactcttcagcttaacaaagtgacccacaggaacagacatgaacatctctacacagggcagggccaaaggtgttcccaggatcctgctagccaagggacaagtcctgattgagggtctagagctcagcagatttatggaggcagcatgcaccctgggagcctgcccagactcctctctggggtttccgttttatctctcaagcttttaagatgccaaaaggaaaagcctttaggaggacgctaaggataacttcgttattcttcagttctctgctcctcctccagctcctctttggtcatcatcttcttgtactggtttcccctcagcttcccggggctgtatttgaaggagaagccttctccgtcctcctcctcaggcccttccgatgatggccccttctcaccatccaagtcctgctcctcttcctgcctcgcctccaccgcctgctcctccgcctccgctggcgccgccgcgggatcccctggcccttcgggctcccccggtcccgcaggctccccgagctcccccagccccgcgggctctccaggctcctccggccccgcgggcgaggccgccggctcgggggcgcaggggcgggacggcgccggggccccggtggcctcggccgggggcgcgggttccgggggcgcgcgggcaggctccgggctcgcggccgc

SEQ ID NO: 622 - DNA, 2145 bp, Homo sapiens
gtttgtgacggacttcccggcgcggtctatggctgcgacttctctaatgtctgctttggctgcccggctgctgcagcccgcgcacagctgctcccttcgccttcgccctttccacctcgcggcagttcgaaatgaagctgttgtcatttctggaaggaaactggcccagcagatcaagcaggaagtgcggcaggaggtagaagagtgggtggcctcaggcaacaaacggccacacctgagtgtgatcctggttggcgagaatcctgcaagtcactcctatgtcctcaacaaaaccagggcagctgcagttgtgggaatcaacagtgagacaattatgaaaccagcttcaatttcagaggaagaattgttgaatttaatcaataaactgaataatgatgataatgtagatggcctccttgttcagttgcctcttccagagcatattgatgagagaaggatctgcaatgctgtttctccagacaaggatgttgatggctttcatgtaattaatgtaggacgaatgtgtttggatcagtattccatgttaccggctactccatggggtgtgtgggaaataatcaagcgaactggcattccaaccctagggaagaatgtggttgtggctggaaggtcaaaaaacgttggaatgcccattgcaatgttactgcacacagatggggcgcatgaacgtcccggaggtgatgccactgttacaatatctcatcgatatactcccaaagagcagttgaagaaacatacaattcttgcagatattgtaatatctgctgcaggtattccaaatctgatcacagcagatatgatcaaggaaggagcagcagtcattgatgtgggaataaatagagttcacgatcctgtaactgccaaacccaagttggttggagatgtggattttgaaggagtcagacaaaaagctgggtatatcactccagttcctggaggtgttggccccatgacagtggcaatgctaatgaagaataccattattgctgcaaaaaaggtgctgaggcttgaagagcgagaagtgctgaagtctaaagagcttggggtagccactaattaactactgtgtcttctgtgtcacaaacagcactccaggccagctcaagaagcaaagcaggccaatagaaatgcaatatttttaatttattctactgaaatggtttaaaatgatgccttgtatttattgaaagcttaaatgggtgggtgtttctgcacatacctctgcagtacctcaccagggagcattccagtatcatgcagggtcctgtgatctagccaggagcagccattaacctagtgattaatatgggagacattaccatatggaggatggatgcttcactttgtcaagcacctcagttacacattcgccttttctaggattgcatttcccaagtgctattgcaataacagttgatactcattttaggtaccaaaccttttgagttcaactgatcaaaccaaaggaaaagtgttgctagagaaaattagggaaaaggtgaaaaagaaaaaatggtagtaattgagcagaaaaaaattaatttatatatgtattgattggcaaccagatttatctaagtagaactgaattggctaggaaaaaagaaaaactgcatgttaatcattttcctaagctgtccttttgaggcttagtcagtttattgggaaaatgtttaggattattccttgctattagtactcattttatgtatgttacccttcagtaagttctccccattttagttttctaggactgaaaggattcttttctacattatacatgtgtgttgtcatatttggcttttgctatatactttaacttcattgttaaatttttgtattgtatagtttctttggtgtatcttaaaacctatttttgaaaaacaaacttggcttgataatcatttgggcagcttgggtaagtacgcaacttacttttccaccaaagaactgtcagcagctgcctgcttttctgtgatgtatgtatcctgttgacttttccagaaattttttaagagtttgagttactattgaatttaatcagactttctgattaaagggttttctttcttttttaataaaacacatctgtctggtgtggtatgaatttctgaaaaaaaaaaa

SEQ ID NO: 623 - DNA, 1197 bp, Homo sapiens
atggcgtggccctgtatcagccgcctgtgctgcctggcgcggcgttggaaccagctggaccgctccgacgtggcggtgccgctcactctgcacggctactcggacctcgacagcgaggagccgggcacgggcggcgccgcctcgcgcaggggccagcctcccgcgggcgcccgggattccggccgggacgtgccgctcactcagtaccagcgggacttcggcttgtggaccacgcccgccgggcccaaggatccgccgccggggcgcggaccgggggcgggcggccgcaggggcaaatcctccgcgcagtcctccgcgccacctgcgcccggcgcccgcggggtctacgtgctgcccatcggcgacgcggacgcggctgcagcagtgaccacgtcgtacaggtatgggctgggtagggaccgcaacgagtccccaccctgtggtgggaggacgcggaggcccggagccagagggatggggtgggcggcagagcggaggcgcctggagcccggatcccacgcgacctcggagctgccggcggcctcagaggtcacccccgtttggtccgtgggcactgcaggcggcgccttcgctgctccatgcccggaaacagtgctcgagcacccccgtgccgggagcgcaccgctgccctcgcagccgccctcctgggggcagccgtcagaatggcctgccttcagccgagttggaaccggcctccctttaactcccaccgccgggcctagccgtgcgaggggtgcgcgcaggccatgtcccccagctctccccggtcactgcctactggatagaacttatactggcttgcagactcttggagcagagacgcttttggctgttgttaatagtgctgctatgaacgtaggtgtacaggtagtggatgttgaactccatcgccattctctcggagaagactgtatctatcctcagtcctcggagtctgacatctctgatgcccctccatctttgcctttgaccattccagccccagtgaaagcttcttcaccaataaagcagtcacatgagccagtacccgatacctctgtggagaaaggcagtcaccgggtcctgcccattccatctttaaggtcccctctcccatctgggctccagccccgggttcctcctctggcggccgccaggattgctgtcgtctgtggctctggtggcttcctgctctga

SEQ ID NO: 624 - DNA, 2778 bp, Homo sapiens
atgcatgtggagcggcgggtgtgccatgccgtgagtaaatacaacgtgacgctgtcgtgtgtggcagggggcctggcagcgaagtccagtggccttgagctcatctggctctgtgacttgctggtcagagaacttggccagctaactgggcctgtctgtaaagtaaggacacctgcattgatctatggtcggcaccaccagcctcccttgccccggcccctaccgacactcacctgcgcagctagcaggtggccacagcctgaggaggccacagcgccaccaggggaaggtggacaaaaagatagagccctgctccctggaatccctgcaggtccgaaagaccagtgccagaaccgccgcaagatcagctccagaaccgccacaagaccagagccagaaccaccgcaagaccggagccagaaccgccgcaagaccagcgccagaaccgcagagccacagggcttgtcactgcctgaggatgatgaccctgcgcctctaagctgcagactggggtgtctgctcacgcactgcctgccttcctgggtgccgtgctgccctccagagagcaccaccctggacgtggtggaggtggagagctatgacccctacacggacagctggacgcccgtcagcccggccctcaaatacgtcagcaacttctcggctgccggctgccggggccggctctacctggtgggctccagcgcctgcaagtacaacgccctggccctgcagtgctacaaccctgtcacagatgcgtggagtgtgatcgcctcgcccttcctgcccaagtacctgtcctcgcctcgctgtgctgcactgcacggggagctctacctcattggggacaacaccaagaaggtctacgtgtacgaccccggggccaacctgtggcagaaggtgcagtcacagcacagcctgcatgagaatggcgcgctggtgccactgggtgatgcgctgtacgtgacgggcggccgctggcagggcatggaaggtgactaccacgtggagatggaggcctacgacacggttcgggacacctggacccgccacggcgccctgccccggctctggctctaccacggggcctccaccgtcttcctggatgtctccaacaagaaaacagaaggatacaggccactactccagttggttgggccatcagttgatccagctgaaagcatgtgtatggatggagaatgtgccaatggcttaaggagagagggcacagccacgtacacaggaaagatgctgcacctccggggccgtgtcattcaccgtccctccccagtgcccggcgtggtatcagctgatcggtctgaagtgtggctgcttctcccggactctgcagcaccaggtacgtggcagggcagccagtccctgctgccacatcctgtgaaccaggacagggtaaggcctcctttccccagcgggctcttctcaaaagagttccccgggaacagcagccctcggtgtgagtgtaagggttttggagcctggactgctgagcagagggtggtccggttggggaggctcctcggcaccgcagcccccatcttcccaccacaacaccctggcctgcgcattggtcagccagctcccaaaagaaggccctgcatccccccagatcagccaggaaccaaaggcagtgacttggcagccggctttgtctctgataaaagggcccagtcagctctaaaatcccagggtccttccctggcagccttgcctggagcccagatagcccaaggcctctcccaggaaggtccctcccaaaactgtgctcagtgtcagcatcagtcaggatgcagcgcggacaggaatgggaacttccggaagcatcactgtccatgtttcggcttgccagggccccctgggcctcccggtccccagggccccccaggccccatcatcccacccgaggcgctgctgaaggagttccagctgctgctgaaaggtgcggtgcggcagcgggagcgcgcggagcccgaaccctgtacgtgtggccccgccgggccggtcgctgcgagcctcgccccggtctcggccaccgccggggaggacgacgacgacgtggccgctttcctctgccgcctgcgccgggacgcgttggtggagcggcgcgcgctgcacgagcttggcgtctactacctgcccgacgccgagggtgccttccgccgcggcccgggcctgaacttgaccagcggccagtacagggcgcccgtggctggcttctacgctctcgccgccacgctgcacgtggcgctcggggagccgccgaggagggggccgccgcgcccccgggaccacctgcgcctgctcatctgcatccagtcccggtgccagcgcaacgcatgccggcaggccccggaggagcgcccgcgacccctcggaggctctccaggtctttctcagcatggtgaacatgggagccggggctctgtctgcatgagggaggtgctcagaccctgcagggcgggaacaaggtggaggaagtcgctggcgctgcagaagctgggcagtcaccccctccacacccactaccagggaaggggcaggaagcatcaggggagtcacctgctctcgtctgagagggaggtgacagccaagaacctgaactacgaatgcaggagccggacagggggaaagggacgtctaagactcatcctcttgttcgttcaacctgttgaagtggcaggattgccagttcctggacgctacctgcagggctccagtgtcccctggaacctgggagatacattcaaatccaagtactga

SEQ ID NO: 625 - DNA, 1203 bp, Homo sapiens
tttttttttttctgttttcctgttgtttttaattaaagtcgcagctctctagaggagcactgtccacctagggaggaaagtaggaggccagtagcaaacccctcccagagctggggacatgtattcccctggggaacccggtggcatccgccctgaggagcgcaccaccccgcccagatccaggtcccgtcagggtgccacctgctgcatgggcctgaggttcggggacacagcaaaggcacaccccgtgctctttttgattgtcgtccacccgtaggccctcccagagctccctcagcgtcagctctttcttcctgtgcacgtcaaacacgggcttctcggtgatgatgcggtccacgcaccgttttcccggtcagcggcatggtgcatttctccatgatctttgggggtgttgtcctttgtgcagtgctgcatggtgaccaccactctggtcttctgactggacaccaagtccatggcaccgcccatgcctttcaccttcttgccagggatcatccagttcgccaggtcgccgtatttggaaacctgcatggctccaagcatggttagttggatgtgtccccctcggatcatggcgaaggagtcgtcgctggcgaagaagcagcccccgggaagcaccgtgaccgtctgcttgcctgcattgatgaggtcggcatccacctcatcttccgtgggaaacgggcccaggcccaggatcccgttctcactgtgaagatggacagtcatgctgggactgatgaagttgctggccagcagggggatgcctatgcccagattggcgtacatgccgtcctcaaattccagagctgcgcgtctgatgatgcgcgtcctggcgtcctcttcctttccagcgtctccatcttcctctttccggatcgttaagcgctcaattcgtttctcgtatttctgcccctttatcacgcgacctacataaatgttaggaacgtggatgtcttctggggggaagcccccacctccaccgccgtgacgtctgcagctttgcacatgggcacgttgaaattgcgggcgcttctcctgaagaccacgtttcctgcccggtcggccttccaccctttcaccagggcgaagtctgcccggatggcgcgctccaaaaggaagtggtcgccgttgaactccctcacctctcggggctggctcatgagcgccaggtggccgtccggg

SEQ ID NO: 626 - DNA, 858 bp, Homo sapiens
ctcgacccgcctgcaggaattcggcacgagccggaatccgcgcgcagcccggatcgtttaaatgagagtttgcagaagatgaaaggggagtcttgcattcagcaatttgccctgtatttaatgagccagccaccttgtgtcttcccctcctatgacatagcccttcagctcaccctacaattgccacatgaaaacttctctcatgaaacccacagggtgcaagttctctcctgttgccctgagtgcccactcccaggccctctgtatgagtgacacttcagtctgccatggaacctggccctgctctggcctggctcctgctcctgagcctgctggcggattgtctgaaagctgctcagtcccgagacttcacagtgaaagacattatctacctccatccttcaaccacaccatatcctggtggatttaaatgtttcacctgtgaaaaggcagcagacaattatgagtgcaaccgatgggctccagacatctactgccctcgagagaccagatactgctacactcagcacacaatggaagtcacaggaaacagtatctcagtcaccaaacgctgtgtcccactggaagagtgcttatccactggctgcagagactccgagcatgaaggccacaaggtctgggcaacagagcaagtgaccagtactacatagccagctgccttctcttcagacatctgccagtactcatgagcagattcttactcccccgtgaaggctgtcttttgattgtctttatgctctgtgaaaagacgcttcctttcctgtttactctaaaagaatacacatttataccagagcataggacaactgatataaattgtgtaaacacacatgaaga

SEQ ID NO: 627 - DNA, 372 bp, Homo sapiens
aaatgagtccagggatcatccagcagctcctcagctgctcctgccacttacccaaggaccaacaagcaaagctgccacctaccactctggagaaatacggctacagcacgggggctgtcacccttctcacactgggctccatgctggggacagcgctggtccttttccatagctgtgaggagaactacaggcttatcttacagctgtttgtgggcttggccgtcgggacactgtctggggacgctctgctccaccttatccctcaggttcttggtttacataagcaggaagccccagaatttgggcatttccatgaaagcaaaggtcatatttggaaactgatgggattaattggaggcatccatggatttt

SEQ ID NO: 628 - DNA, 2159 bp, Homo sapiens
ttttttttttttactggaaaaacgctttatttctattcaatatttaaaagacagttataaacaggatgcattcaatagcaagggggcagatgaacatcaggaaggaacatccatgagcttccatccacggaacctcaccatggatacgcttgtgatcaagggcctggtctcccctcaagacacggtcacagatcagagggcacaccatcctagcagtggagcaggaccagctgggacagggtccttctgtgacacctgctgcatcaccaggctgggtgaacggacacaattgccagaactcacagaatagaagtatcagcaccgaaacctcacagggaaaatgggtaagttctaagtttctccattaatagtaactctcagattaatctctgtcatccatcgcttctccaagaaatgactttttagggtgacgtgccaggcgccatgttggagggctggtggtagcggcttggggaggtgctcactctgtcggtctcactctctcacacgcttcccctggctcccttcgttcccccccaccccacttggcttgcgtgctggagggtgtgcgagggagtgggaggatgtcggggggtggggggaggcgttccggtccccaagagacccgcggagggagacggaggctgtgagggactctgggaagccatggacgtcgacaggctccaggaggcgctggaagattttgagaagagggggaaaaaggaagtttgtcctgtcctgggatcagttttctttgtcatgtagccaagactggagaaacaatgattcagtggtcccaatttaaaggctattttattttcaaactggagaaagtgatggatgatttcagaacttcagctcctgagccaagaggtcctcccaaccctaatgtcgaatatattccctttgatgaaatgaaggaaagaatactgaaaattgtcactggatttaatggtatcccttttactattcagcgactatgtgaattgttaacagatccaaggagaaactatacaggaccagacaaaatttctcagagggagtagaaaagaatgtgatgggttgttagctgtgtttatccttcttcagagaaaaacaattccaatagtttaaatccgaatgaatggtgttatgtttcctggaaattcaccaagctatactgagaggtctaatataaatgggcctgggacacccaggccactttaatcgcaccaaaggtttctttgtcagccccccatgaccaacaaatgggttgcccttgagagcacagacagcaaagaggcaattttgcagcaaaatgaggagaaaaatcacagccgactcttccgacctctggaatcagaagtttcctcagtgagcccctttgaaaaataaacatccagatgaagatgctgtggaagctgaggggcatgagggtaaaaggctcagggtttgacaaagaaggtgaagtcagagaaacagccagtcaaacgacttccagcgaaatttcttcagttatggtaggagaaacagaagcgatcatcttcatctcaggataaagacaaagatagccgttgtacccggcagcactgtacagaagaggatgaagaagaggatgaagaggaagaagaagagtcttttatgacatcaagagaaatgatcccagaaagaaataaacaagaaaaagaatctgatgatgcctcaactgtgaatgaagagacttctgaggaaaataatgaaatggaggaatctgatgtgtctcaagctgagaaagatttactacattctggaaggtagtgaaaacgaaggccctgaaagtaagtggttcttctgactgccgtgaaacagaagaattagtaggatccaattcccagtaaaactggaaagaatctttccagaatcatcccatggataatgatgacgaagccacagaagtcaccgatgaaccactggaacaagactaactatttagaaacatttagatgcagtattttacatacagttctggttttaacactgtataaaacttttgtgtaataaaatggacctttagttttacaagagaagcaggttgtaaaataaagtactttatggataattcctgaaagagttgtacatgtaagaactgtgaatatcagctcctctgggtcctgcttaccttaccgctgacttttctttct

SEQ ID NO: 629 - DNA, 384 bp, Homo sapiens
aatacacgcctcgcagtaattgaactggtactggccccggctgggttggtacggaaacaccacacctagggggtggcggggatcctggggagggccagcggatgggagcggagggggaggaagggcggcgcggcctgggagagggagctggggtccccaggggtgcggaggagatactgggaaggagccctgggagacccaggcgaggcggacccgctgctacacaggaatggggcgggagcggaagggcctcaccctccaagctcaaggtcagcgccacgctctcgtcctcgatgccgttgatgagctcgcagcggtaccggccctcgtcctccaggcgcacgcccgcgatgaccagggaggcgtctagtcgatgccccctcc

SEQ ID NO: 630 - DNA, 581 bp, Homo sapiens
ttttttttttttttaataactgttcagctacaaaattttattggtatctttttatgttccctctagaggatgtaatgcacaaaagcattgccacggaacatataaaattacaaatgaaatttattgtaaaaagtagaatgtcttctagactggtgtcagtatttatgtcattcataaaccaaaactgctgtataatatattcattgtcagcaagttcatgtgtgtaaattgccatccaatgttattgactgatataagacagatattgaaaagacaatttaaatttactcttccaaacataaactgttccacaaaagcactgtaaaaactccttcaagattttgggttgtgcttgacatttatggttaactacataatttggtcgtgtcataatccattgtgtttggcaatttggcattaaacgcctgcagagcagattggatcctcaccccctcactagtagacagcttgagtctatgacgaagcaagcaagagaaaagatctagacgacgctgcccaggtggggagagtttatctactagagatcagagcccgtgtagttgcaaaagtgctgaatcctg

SEQ ID NO: 631 - DNA, 571 bp, Homo sapiens
  misc_feature (1)...(571): n = a,t,c or g
gggcccgaccgcggccgccccaccagccctgaactgcagcacggtgccagggcgggccaacacacgtccctgcctttgtaggcactgcctgccccacacggattccgggccacgccccagcccgacaatgtcgagaatattattattaatattattatgatttttgaaagaaccgaggcgatgccacgctttgctgctaccgccctgggctggactggaggtgggcatgccaccctcacacacacagntgggcatgcacccagngcctccccccccccatctggaagtgaaggcccagggactcctccaacagacaacggacggacggatgccgctggtgctcaggaagagctagtgccttaggtgggggaaggcaggactcacgactgagagagagaggagggggatatgaccaccctgccccatctgcaggagcctgaagatccagctcaagtgccatcctgccagtggcccccagactgtggggttgggacgcctggcctctgtgtcctagaagggaccctcctgtggtctttgtcttgatttttcttaataaacggtgctatccccg

SEQ ID NO: 632 - DNA, 440 bp, Homo sapiens
cccgtagacgtcttacctgcctacgccaagcttggcacgaggggtctctgcagtgagtggggagcctacataaaagagagtaaagaggggcaaaaacccagatcagaatgcaggcgacgtccaaccttctcaacctcctgctgctgtctttgtttgccggattaaatccttccaagactcacattaatcctaaagaagggtggcaggtgtacagctcagctcaggatcctgatgggcggggcatttgcacagttgttgctccagaacaaaacctgtgttcccgggatgccaaaagcaggcaacttcgccaactactggaaaaggttcagaacatgtcccagtctattgaagtcttaaacttgagaactcagagagatttccaatatgttttaaaaatggaaacccaaatgaaagggctgaaggcaaaatttcggcagatt

SEQ ID NO: 633 - DNA, 440 bp, Homo sapiens; identical to SEQ ID NO: 632

SEQ ID NO: 634 - DNA, 864 bp, Homo sapiens
tttcgtgggctgggtggcacggctggcgagcccggaactcctctggtcacagctcagcgtccgcggagccgggcggcgctgcagctgcacttggctcgtctgtgggtctgacagtcccagctctgcgcggggaacagcggcccggcgctgggtgtgggaggaccaggctgccccaagagcgcggagactcacgcccgctcctctcctgttgcgaccgggagccgggtaggaggcaggcgcgctccctgcggccccgggatgacttctcagcgttcccctctggcgcctttgctgctcctctctctgcacggggttgcagcatccctggaagtgtcagagagccctgggagtatccaggtggcccggggtcagacaagcagcctggcctgcactttcactaccagcgctgccctcattaacctcaatgtcatttggatggtcactcctctctccaatgccaaccaacctgaacaggtcatcctgtatcagggtggacagatgtttgatggtgccccccggttccacggtagggtaggatttacaggcaccatgccagctaccaatgtctctatcttcattaataacactcagttatcagacactggcacctaccagtgcctggtcaacaaccttccagacatagggggcaggaacattggggtcaccggtctcacagtgttagttcccccttctgccccacactgccaaatccaaggatcccaggatattggcagcgatgtcatcctgctctgtagctcagaggaaggcattcctcgaccaacttacctttgggagaagttagacaataccctcaaactacctccaacagctactcaggaccttggcgatgaccttgagcagtag

SEQ ID NO: 635 - DNA, 709 bp, Homo sapiens
attgaagatgatggggaaattataagtgatgttctaaaaattcctgttcagcttgtttttaaaaataagataaagctatattggagtaaagtgaaagctgaaccatctgagaaagtctctcttaggatctctgtgacacagcctgactccatagttgggattgtagctgttgacaaaagtgtgaatctgatgaatgcctctaatgatattacaatggaaaatgtgagtttagctattttttcattatgaaaatatgtattacaagagaaagaggaaactttattgtactactttaaatatttaaagaaaatttcattagttcctttgcatgtgtaagtcaataattagtaaagcttccaaataaaaagtaatctgtatcgtaatggttatgttggaaagaagcttatgtggttaagtgtccttgctctctttcatcagaattatcacctaaagttagatgggaggaataaattctggaggtctgtggtacaacatggtgactgtagttaatgataatgtaccatatacttgaaaattgctaaaagagtagatttgaaatgttctcaccacaaaaaatgatcagtatgtagtatgcaaggtgaaagatatgttatttagcttaacatccccccggttatacaaaaaccaatttttcccattgtatcccttaatgttttcaataaaaattgccccctatacaaaaaaaaat

SEQ ID NO: 636 - DNA, 640 bp, Homo sapiens
tgtggtagcagttgaatatgccctgtcgaattacctttttgcagctgttggaaaccctaaggacttgtttgaggtttgtttgatggctcaggatttggacacagctgcctcttaccttattatcttacagaatatggaagtccctgcagtaagtaggcaacatgctacccttctattcaacacagcactagaacaaggcaagtgggacctttgtcgacacatgattcgatttcttaaagccattggctctggagaatctgagacacctccatccacacccacagctcaggaacccagttcaagtggtggatttgagttcttcaggaatcgaagcatcagtttatcccagtcagctgaaaatgttcctgccagtaaattcagtttacagaaaacactaagtatgccatctggtccctctggaaaaagatggagcaaagacagtgactgtgctgagaacatgtatattgacatgatgctctggagacatgctcggcgcctcttagaagatgtgaggttaaaggaccttggctgctttgcagcccagctgggctttgaactaattagttggctatgcaaggaacgtacccgagccgcccgggtagacaactttgtaatagccctgaagagactccacaaagat

SEQ ID NO: 637 - DNA, 1549 bp, Homo sapiens
aggacgaggatgtttctggaagaaaaaatcccctcgatttctgatttaaagctagcaattcgaagagctactctgaaaagatcatttactcctgtatttttgggaagcgccttgaagaacaaaggagttcagcctcttttagatgctgttttagaatacctcccaaatccatctgaagtccagaactatgctattctcaataaagaggatgactcaaaagagaaaaccaaaatcctaatgaactccagtagagacaattcccacccatttgtaggcctggcttttaaactggaggtaggtcgatttggacaattaacttatgttcgcagttatcagggagagctaaagaagggtgacaccatctataacacaaggacaagaaagaaagtacggttgcaacggctggctcgcatgcatgccgacatgatggaggatgttgaggaagtatatgccggagacatctgtgcattgtttggcattgactgtgctagtggagacacattcacagacaaagccaacagcggcctttctatggagtcaattcatgttcctgatcctgtcatttcaatagcaatgaagccttctaacaagaacgatctggaaaaattttcaaaaggtattggcaggtttacaagagaagatcccacatttaaagtatactttgacactgagaacaaagagacagttatatctggaatgggagaattacacctggaaatctatgctcagaggctggaaagagagtatggctgtccttgtatcacaggaaagccaaaagttgcctttcgagagaccattactgcccctgtcccgtttgactttacacataaaaaacaatcaggtggtgcaggccagtatggaaaagtaataggtgtcctggagcctctggacccagagggactacactaaattggaattttcagatgaaacattcggatcaaatatttccaaagcagtttgtgcctgctgtagaaaaggggtttttagatgcctgcgagaagggccctctttctggtcacaagctctctgggctccggtttgtcctgcaagatggagcacaccacatggttgattctaatgaaatctctttcatccgagcaggagaaggtgctcttaaacaagccttggcaaatgcaacattatgtattctttgaacctattatggctgtggaagttgtagctccaaatgaatttcaggggacaagtaattggcaggaattaaccgacgccatggggtaatcactgggcaagatggagttgaggactattttacactgtatgcagatgtaagtagtcttggtcattggcagtcctgcttttattaaccatagaaggaaatccaggttagcttttgtttttgcaaatggacacatttccttgctgaatttgtggctttatacatgtggcattttctgtaatttgctattaaagcaactcttaagtgcagaagttaaaaataagatttattttatcttgaccttttgtgaatgtgtcattttcttagatgtatattatctctctttcttgaataagcacagatggacaaatt

SEQ ID NO: 638 - DNA, 1210 bp, Homo sapiens
ggaagtaggaggagagtcaggactcccaggacagagagtgcacaaactacccagcacagccccctccgccccctctggaggctgaagagggattccagcccctgccacccacagacacgggctgactggggtgtctgccccccttggggggggggcagcacagggcctcaggcctgggtgccacctggcacctagaagatgcctgtgccctggttcttgctgtccttggcactgggccgaagcccagtggtcctttctctggagaggcttgtggggcctcaggacgctacccactgctctccgggcctctcctgccgcctctgggacagtgacatactctgcctgcctggggacatcgtgcctgctccgggccccgtgctggcgcctacgcacctgcagacagagctggtgctgaggtgccagaaggagaccgactgtgacctctgtctgcgtgtggctgtccacttggccgtgcatgggcactgggaagagcctgaagatgaggaaaagtttggaggagcagctgactcaggggtggaggagcctaggaatgcctctctccaggcccaagtcgtgctctccttccaggcctaccctactgcccgctgcgtcctgctggaggtgcaagtgcctgctgcccttgtgcagtttggtcagtctgtgggctctgtggtatatgactgcttcgaggctgccctagggagtgaggtacgaatctggtcctatactcagcccaggtacgagaaggaactcaaccacacacagcagctgcctgactgcagggggctcgaagtctggaacagcatcccgagctgctgggccctgccctggctcaacgtgtcagcagatggtgacaacgtgcatctggttctgaatgtctctgaggagcagcacttcggcctctccctgtactggaatcaggtccagggccccccaaaaccccggtggcacaaaaacctggtgaggcctcccccttcccaagtccattcccactgtaggccgatgcctgtgcaaaggacgcagtgccatatcagagaggatccttgaagaggactcaccccaagcaagggaaaattggtgggggaacttctgccttcctggtttccttgactttggcctcctcctcttcctccttatcttctccaacctccttcctttatttgttccacagactggaccgcagatcattaccttgaaccacacagacctg

SEQ ID NO: 639 - DNA, 632 bp, Homo sapiens
cccacgcgtccggcctgcaatggacccggcttgtctgtgctgtgcttcatgcgtcacgacatcctggagtatttcagtgtctacgggacagccctgagcatgtgggtctcgctgatggcactggccgacttcgacgaacccaagaggtcaacatttgtgatgttcggcgtcctgaccattgctgtgcggatctaccatgaccgatggggctacggggtgtactcgggccccatcggcacagccatcctcatcatcgcggcaaagtggctacagaagatgaaggagaagaagggcctgtacccagacaagagcgtctacacccagcagataggccccggcctctgcttcggggcgctggccctgatgctacgcttcttctttgaggactgggactacacttacgtccacagcttctaccactgtgccctggctatgtcctttgttctgctgctgcccaagcaagcagccagcacccccctttcccgcttcgcagcagcagcacatggaaagttggaggcggcaggccactccgagcagggcggcgacgagggccctgccaagcgcgaagggccacactggcaggctcctcactgcagcgatttacgaaggccgcccaaagcctggccaagtct

SEQ ID NO: 640 - DNA, 476 bp, Homo sapiens
tttcgtccagcactgcccatccttgcccctttccactgtccttggagcttcctgggcccttccctgggcctcaggatcccaccctccatcccgtctgccctgcaggatgccgcagctgagcctgtcctggctgggcctcgggcccgtggcagcatccccgtggctgcttctgctgctggttggaggctcctggctcctggcccgcgtcctggcctggacctacaccttctatgacaactgccgccgcctccagtgttttcctcaacccccgaaacagaactggttttggggacaccagggcctggtcactcccacggaagagggcatgaagacattgacccagctggtgaccacatatccccagggctttaagttgtggctgggtcctaccttccccctcctcattttatgccaccctgacattatccggcctatcaccagtgcctcagctgctgtcgcacccaaggatatgattt

SEQ ID NO: 641 - DNA, 792 bp, Homo sapiens
aggaaggctgattttatttagccgtttcttttttcttggtttgcacagtatctgggtccagcctgcagccctagggtccagttcagagtctgtcatctgaaccatgaggatctggtggtttctgcttgccattgaaatctgcacagggaacataaactcacaggacacctgcaggcaagggcaccctggcatccctgggaaccccggtcacaatggtctgcctggaagagatggacgagacggagcgaagggtgacaaaggcgatgcaggagaaccaggacgtcctggcagcccggggaaggatgggacgagtggagagaagggagaacgaggagcagatggaaaagttgaagcaaaaggcatcaaaggtgatcaaggctcaatgaggatccccaggaaaacatggccccaaggggcttgcagggcccatgggagagaaaggcctccgaggagagactgggcctcaggggcagaaggggaataagggtgacgtgggtcccactggtcctgaggggccaaggggcaacattgggcctttgggcccaactggtttaccgggccccatgggccctattggaaagcctggtcccaagggagaagctggacccacggggccccagggtgagccaggagtccggggaataagaggctggaaaggagatcgaggagagaaagggaaaatcggtgagactctagtcttgccaaaaagtgctttcactgtggggctcacggtgctgagcaagtttccttcttcagatgtgcccattaaatttgataagatccacatcactg

SEQ ID NO: 642 - DNA, 792 bp, Homo sapiens; identical to SEQ ID NO: 641

SEQ ID NO: 643 - DNA, 792 bp, Homo sapiens; identical to SEQ ID NO: 641

SEQ ID NO: 644 - DNA, 792 bp, Homo sapiens; identical to SEQ ID NO: 641

SEQ ID NO: 645 - DNA, 394 bp, Homo sapiens
ctcattcaaatatcccacgggcatttttaccaggttttttctacttccaaattccataatcaaggctggttttggtaccaaaggtttctttttagaagataagaaaacgaagatagcttctaccaaaatctgcaacaataagatactctggttgatatgtagcgaatttatgtccttatgggctggatccaacaagaaaaatatgaatcagagtcgaatggatgtgtatatgtcacatgctcccactggttcatcagtacacaacattctgcatataaaacagctttaccactctgatgaattcagagcttatgactggggaaatgacgctgataatatgaaacattacaatcagagtcatccccctatatatgacctgactgccatgaaagtg

SEQ ID NO: 646 - DNA, 2112 bp, Homo sapiens
tttcgtggagaggcggaaaggatggcgctgtgacagccgggccggagccctcgcgtccccaccccgcgccctggccgctgggcccggcgagatggagtccacagcctaccctctcaatttgagcctgaaagaagaggaagaggaagaagagattcagagccgggaactagaggacggcccggcagacatgcagaaagtacgaatctgctctgagggcggatggaaaatgaagaatctgacgtaaagcctccagactggccaaacccaatgaatgctacctcccagtctcctcagcctcagcactttgacagctttggcctccgtctgcctcgggatatcacagagctgcccgagtggagtgaggggtaccccttctacatggccatgggcttcccagggtatgacctctcggctgatgacatagctgggaagtttcagttcagccggggcatgcgccgcacttacgacgcagggttcaagctgatggtagtggaatatgctgagagtaccaacaactgccaggctgccaagcagtttggagtattggaaaaaaacgttcgagactggcgcaaagtgaagccacagcttcaaaacgcccacgccatgcggcgggcattccgaggccccaagaatgggaggtttgctctggtggaccagcgtgtggccgaatatgtcagatacatgcaggccaaaggggaccccatcacccgggaggcgatgcagctgaaagctctcgaaatcgcccaggaaatgaacattccagagaaagggttcaaggcaagcttgggttggtgtcgaagaatgatgagaaggtatgacctgtctctgaggcataaagtgcccgtgccccagcacctgccggaagacctgactgagaaactcgtcacttaccagcgcagtgtcctggctctgcgcagggcgcatgactatgaggtagctcagatggggaatgcagatgagacgcccatttgtttagaggtgccatcacgggtaactgttgataaccagggcgaaaagcctgtcttggtcaagacaccaggcagggaaaaactgaaaatcacagcactgcttggtgtcttggctgatgggaggaagttaccaccgtacatcattttgaggggaacatatatccccccggggaagtttcccagtgggatggaaattcgctgccaccggtatgggtggatgactgaagacttgatgcaggactggttggaagtggtgtggagacggaggacaggagcagtgcccaagcagcgagggatgctgatcttgaatggcttccggggccatgccacagattccgtgaagaactccatggaaagcatgaacactgacatggtgatcatcccagggggtctgacctcacagcttcaggtgctggatgtcgtggtctacaagccactgaatgacagtgtgcgggcccagtactccaactggcttctggctgggaacctggcgctgagcccaaccgggaatgctaagaagccacccctgggcctctttctggagtgggtcatggtcgcgtggaatagcatctcaagtgagtccatcgtccaagggttcaagaagtgccatatctccagcaacttggaggaggaagacgatgtcctgtgggaaatcgagagtgagttgccaggaggaggagaaccaccaaaagattgtgacaccgaaagcatggctgagagcaactgaagggaaagggaaagcaaatggaactctgatttaaacagctggggatgaaattcctcaagatgattattcctgaaagtgtggatgcgctggatgcgcagggaacatcaggaaaaggccacggggctctgaacagccccggtccagacagcagcctgtacatccatcccaggacacagcccagcccctccccacaccatacaaggtatcagaaaagtctaggacctatcatttcatcagagacatgatcagaaaagaaactgcttctgccccatttcttgttttggagattactccatctgtccatcaaaagaaacctgtaaatatgaaagaacaaaggttatttcgtggagaaaaaaaaatttattcaacaccaacaagggacatgtattgcggccggtctggaggatccacacgatc

SEQ ID NO: 647 - DNA, 1225 bp, Homo sapiens
ggaattccgcgttagatgatagatcgagcagcctcaggccgctggcgttgacgaaaacgccgcgatccagcgcatgtagttcgttgtggtctaagtgcagggcgcgcagctggaagaggggcgccaaccagccggggcgcatgcgctggagcgcgttgtggctcaggtcgaggtccgcagtaccggcaggtaactcggctggcacgtcctgcagccctaggccagtgcagcttagcaggtcggcagcgcagatacatttgtaggggcagttgtggagcgcacggggcgggaaaccctcggagtccggggtgcctaacccaacgcgcagcatgcagagcagtgtccccagcagcaccaaccaggtcatggcggcgaccaccagggacagtacagagcagctctgtgcaggttgcagttccaggactcaccctcttctgctctagtgcgacatgggtggcaccggatggcccttgccgaggaggcacggcgggttcttgccagccgacggcccctactctccggttcccaggttgtgaggcggtgcggcactcttagccgcgctcccttcggcttcgctagccctctccaagcgagttcctgatcggctcctaaatactccccccaggggcggggcccgggctcctattggttcccgtttgaggaggcggggcggctacatccctttgtgcccaatggccccgcatgaccgccagatggggagcaaggccaaccccaaagtccccgtcagcctttggctggcagctctccgccgctcgtttttcctcggggagtaaaagggggagtctggaagaatgtctccaagctgctgttagtgtttatttgaagtgactttgaaggactgataatattatggggcaggcagactctcactatcttaaggtggttcgcctgagccttcttaaagtggtaccccaggccgggcgcggtggctcacgcctgtaatcccagcactttgggaagccaaggcaggtggatcacctgaggtcaggaattcgagaccagcctggccaacctggtgaaaccctgtctctactaaaaatacaacaacaattagccgggcgtggtggtgggcgtctgcaattccagctactcgggaggctaaagcaggagaatcacttgaacccgggaggtggaggttgcagtgagccgagatcgtgccatcgcactccagcctgggcaacagagcgagactcgtctcaagaaa

SEQ ID NO: 648 - DNA, 411 bp, Homo sapiens
gagcacctgggttggtcccgaagcctccaaccacctggacgcctggcagggcctctctggggcagccatgaagtccctcgtcctgctcctttgtcttgctcagctctggggctgccactcagccccacatggcccagggctgatttatagacaaccgaactgcgatgatccagaaactgaggaatataaagaagcacgtttagtactggattcagtgaagttagaagcctgaaacttttctcgtatggggtgggttttgcattaaatcctggggtccattttacaatccattatttttgaccactgctatgtgttcaagtagtatgagaatgtgattggttttatctggttacatatatatttctttggctaatttaatatgtcaaataaatgagttcatctaaaaaaaaa

SEQ ID NO: 649 - DNA, 411 bp, Homo sapiens; identical to SEQ ID NO: 648

SEQ ID NO: 650 - DNA, 411 bp, Homo sapiens; identical to SEQ ID NO: 648

SEQ ID NO: 651 - DNA, 2424 bp, Homo sapiens
tttcgtctgaggctgaggctggggaacatcgggcagcatgagcggctgcgggctcttcctgcgcaccacggctgcggctcgtgcctgccggggtctggtggtctctaccgcgaaccggcggctactgcgcaccagcccgcctgtacgagctttcgccaaagagcttttcctaggcaaaatcaagaagaaagaagttttcccatttccagaagttagccaagatgaacttaatgaaatcaatcagttcttgggacccgtggaaaaattcttcactgaagaggtggactcccgaaaaattgaccaggaagggaaaatcccagatgaaactttggagaaattgaagagcctagggctttttgggctgcaagtcccagaagaatatggtggcctgggcttctccaacaccatgtactcaagactaggggagaccatcagcatggatgggtccatcactgtgaccctggcagcgcaccaggctattggcctcaaggggatcatcttggctggcactgaggagcagaaagccaaatacttgcctaaactggcgtccggggaagcacattgcagccttctgcctcacggagccagccaatgggagcgatgcagcctaaatccggagcagagccacactaagtgaagacaaaaagcactacatcctcaatggctccaaggtctggattactaatggaggactggccaatatttttactgtgtttgcaaagactgaggtcgttgattctgatggatcagtgaaagacaaaatcacagcattcatagtagaaagagactttggtggagtcactaatgggaaacccgaagataaattaggcattcggggctccaacacttgtgaagtccattttgaaaacaccaagatacctgtggaaaacatccttggagaggtcggagatgggtttaaggtggccatgaacatcctcaacagcggccggttcagcatgggcagcgtcgtggctgggctgctcaagagattgattgaaatgactgctgagtacgcctgcacaaggaaacagtttaacaagaggctcagtgaatttggattgattcaggagaaatttgcactgatggctcagaaggcttacgtcatggagagtatgacctacctcacagcagggatgctggaccaacctggctttcccgactgctccatcgaggcagccatggtgaaggtgttcagctccgaggccgcctggcagtgtgtgagtgaggcgctgcagatcctcgggggcttgggctacacaagggactatccgtacgagcgcatactgcgtgacacccgcatcctcctcatcttcgagggaaccaatgagattctccggatgtacatcgccctgacgggtctgcagcatgccggccgcatcctgactaccaggatccatgagcttaaacaggccaaagtgagcacagtcatggataccgttggccggaggcttcgggactccctgggccgaactgtggacctggggctgacaggcaaccatggagttgtgcaccccagtcttgcggacagtgccaacaagtttgaggagaacacctactgcttcggccggaccgtggagacactgctgctccgctttggcaagaccatcatggaggagcagctggtactgaagcgggtggccaacatcctcatcaacctgtatggcatgacggccgtgctgtcgcgggccagccgctccatccgcattgggctccgcaaccacgaccacgaggttctcttggccaacaccttctgcgtggaagcttacttgcagaatctcttcagcctctctcagctggacaagtatgctccagaaaacctagatgagcagattaagaaagtgtcccagcagatccttgagaagcgagcctatatctgtgcccaccctctggacaggacatgctgaggcaggggacagtgtcccctgctaccgcccgcccctacccatggcccgttgctggatgactgttactcttttttcagaaggtgttgggattatcacaggttaagccttttgttccccgtctgcacctgaagggttgtcgcctggcctgggagagcctcttccaggttttgacctgcaggcagtgctctctaacaggaccatcacagcttctgaactgagccggagagagagaatggaattgctgacccctggaactggcgggtattctggtcattgaggagacaccatagtggaaactggggcttatgctgctgcctccagggtgtgaggtgggtggggacctgtgtcaggtgtggatagccatttctgctcaaccacacattctctaagaaacagcttgaaagctctgtctgggtcattcatttaaactagaagcagaggcacttaaaacatgtaccaggaaccatttaacaaagaatataaaatgtcacaatctgtgtactgttaaaaaaaaaaaaaa

SEQ ID NO: 652 - DNA, 1891 bp, Homo sapiens
tgcaggaattcggcacgaggctgagcggatcctcacacgactgtgatccgattctttccagcggcttctgcaaccaagcgggtcttacccccggtcctccgcgtctccagtcctcgcacctggaaccccaacgtccccgagagtccccgaatccccgctcccaggctacctaagaggatgagcggtgctccgacggccggggcagccctgatgctctgcgccgccaccgccgtgctactgagcgctcagggcggacccgtgcagtccaagtcgccgcgctttgcgtcctgggacgagatgaatgtcctggcgcacggactcctgcagctcggccaggggctgcgcgaacacgcggagcgcacccgcagtcagctgagcgcgctggagcggcgcctgagcgcgtgcgggtccgcctgtcagggaaccgaggggtccaccgacctcccgttagcccctgagagccgggtggaccctgaggtccttcacagcctgcagacacaactcaaggctcagaacagcaggatccagcaactcttccacaaggtggcccagcagcagcggcacctggagaagcagcacctgcgaattcagcatctgcaaagccagtttggcctcctggaccacaagcacctagaccatgaggtggccaagcctgcccgaagaaagaggctgcccgagatggcccagccagttgacccggctcacaatgtcagccgcctgcaccggctgcccagggattgccaggagctgttccaggttggggagaggcagagtggactatttgaaatccagcctcaggggtctccgccatttttggtgaactgcaagatgacctcagatggaggctggacagtaattcagaggcgccacgatggctcagtggacttcaaccggccctgggaagcctacaaggcggggtttggggatccccacggcgagttctggctgggtctggagaaggtgcatagcatcacgggggaccgcaacagccgcctggccgtgcagctgcgggactgggatggcaacgccgagttgctgcagttctccgtgcacctgggtggcgaggacacggcctatagcctgcagctcactgcacccgtggccggccagctgggcgccaccaccgtcccacccagcggcctctccgtacccttctccacttgggaccaggatcacgacctccgcagggacaagaactgcgccaagagcctctctggaggctggtggtttggcacctgcagccattccaacctcaacggccagtacttccgctccatcccacagcagcggcagaagcttaagaagggaatcttctggaagacctggcggggccgctactacccgctgcaggccaccaccatgttgatccagcccatggcagcagaggcagcctcctagcgtcctggctgggcctggtcccaggcccacgaaagacggtgactcttggctctgcccgaggatgtggccgttccctgcctgggcaggggctccaaggaggggccatctggaaacttgtggacagagaagaagaccacgactggagaagccccctttctgagtgcaggggggctgcatgcgttgcctcctgagatcgaggctgcaggatatgctcagactctagaggcgtggaccaaggggcatggagcttcactccttgctggccagggagttggggactcagagggaccacttggggccagccagactggcctcaatggcggactcagtcacattgactgacggggaccagggcttgtgtgggtcgagagcgccctcatggtgctggtgctgttgtgtgtaggtcccctggggacacaagcaggcgccaatggtatctgggcggagctcacagagttcttggaataaaagcaacctcagaacaaaaaaaaaa

SEQ ID NO: 653 - DNA, 1329 bp, Homo sapiens
actgcacgcactggatcggaattaccgggtcgagccacgcgtccgatggtaagaatggtgcctgtcctgctgtctctgctgctgcttctgggtcctgctgtcccccaggagaaccaagatggtcgttactctctgacctatatctacactgggctggtccaagcatgttgaagacgtccccgcgtttcaggcccttggctcactcaatgacctccagttctttagatacaacagtacagacacggaagtctcagcccatgggactctgggagacaggtgggaagggaatgggaggattgggaagccaggacaagccaactttcaggaaggccagggggagggacattcttttatgggagaccctggaaagacattgtgggagttatttaccaacgacagtaaacggggtcttcacgtatttgcaggggaaggtttggttgttgagatcgagattaacagaagcagcggcatttcttgggaatttttactatgatggaaaggactacattgaatttcaacaaaggaaatcccagcctggggtcccctttcgacccagcagcccagataaccaagcagaagtggggaggcagaaccagtctacgtgcagcgggcccaaggcttacctggaggaggagtgccctgcgactctgcggaaaatacctgaaatacagcaaaaatatcctgggaccggcaaagatcctccctctgttggtggtcaccagccaccagggccccagggagaaaaaagaagaaacttgaagtgcctgggccttacgactttctaccccaggggaaaatttgatgttgcactgggacttcggggccgggcgaggttgcagggagccttgagtttacgggggagatgttctttcacaatgggaaatgggcattttacccagtccctggggttgttgttggcagtgcccccccgcaggaacacagccccccctactccctgcccacgtgcagcacagcaagccctggcccagccccttcgtggtgcccctggggaggccaagctaggaagcaagggtttggaggcaatgtgggatcttcagacccagttagcttgccctttccttgccttgatgttggggagctgaacccacagaaatcacagtcaatgggttccacaaggcctgaaggagcagtgttggggggacagacaggaggttggatttggagaccgaagacttggatgcctgtcttgagtagacttggacccaaaaaaatcatctcaccttgaggcccagccccaccccattgtcttaatctgttaggaagcttaataaataattcatccctcccttgcctagcataaaaaaaaaa

SEQ ID NO: 654 - DNA, 404 bp, Homo sapiens
tttcgtctgtgagctgcggcagctgagcagaggcggcggcgcgggacctgcagtcgccagggattccctccaggtgacgatgctctggttctccggcgtcggggctctggctgagcgttactgccgccgctcgcctgggattacgtgctgcgtcttgctgctactcaattgctcgggggtccccatgtctctggcttcctccttcttgacaggttctgttgcaaaatgtgaaaatgaaggtgaagtcctccagattccatttatcacagacaacccttgcataatgtgtgtctgcttgaacaaggaagtgacatgtaagagagagaagtgccccgtgctgtcccgagactgtgccctggccatcaagcagaggggagcctgttgtgaacagtgcaaaggttgca

SEQ ID NO: 655 - DNA, 594 bp, Homo sapiens
tttcgtgggcttctgaggcgtctaccttcccagtcctaggactgatctccaggaccagcactcttctcccagcccttagggtcctgctcggccaaggccttccctgccatgcgacctgtcagtgtctggcagtggagcccctgggggctgctgctgtgcctgctgtgcagttcgtgcttggggtctccgtccccttccacgggccctgagaagaaggccgggagccaggggcttcggttccggctggctggcttccccaggaagccctacgagggccgcgtggagatacagcgagctggtgaatggggcaccatctgcgatgatgacttcacgctgcaggctgcccacatcctctgccgggagctgggcttcacagaggccacaggctggacccacagtgccaaatatggccctggaacaggccgcatctggctggacaacttgagctgcagtgggaccgagcagagtgtgactgaatgtgcctcccggggctgggggaacagtgactgtacgcacgatgaggatgctggggtcatctgcaaagaccagcgcctccctggcttctcggactccaatgtcattgaggtagagcat

SEQ ID NO: 656 - DNA, 742 bp, Homo sapiens
gattactctatgcccaggctggagtgcagtagctcaatctcagctcactgcagcctcaacctgctggactcaagcagtcctcccaccccagcctcccaagtagctgggactacagatactcaacaccacacccggctaatttttttgtagagatggaatttcaccatgttgcccaggctggtctcgaactcctaggctcaggcgatctgcccacctcaacctcccacagtgctggtattacaggcgtgaagccaccacgcgccaccaagattgatttcttctgaggggtctcttcttggccatcttctgtgtcttcccatggtcttccctctgttatgcgtctttgtcctgatttcttcttccttggctggtgaggaggccgccgggctccgggtccagaagctctggccggctgttgttctgagccatctgccggtctgctggtttcactgctctggaatctggagtgaggtcattgagctgaaggttggacgggagggacatgttctcccgtggcaggcgcacgttgttgagttttaggttgttggagtcacttgatatcagagatgggtgccgggaggggcctgtggagaaagaaaccatgtccctaattctcagtgtgccctcccacgctgggctgtcctaccctttcagacccaggaccctcaggcaaggggtctctcaaatgcccaggcctggccctggggccagagactgggttcccagtgcttgaccggattct

SEQ ID NO: 657 - DNA, 1389 bp, Homo sapiens
agccagtcgctgcaaaccaaaccgcgtgtgtccgctgggtctctgggcatgcagtttgctcccactgcgggaatggggtgggggcaggccgagcctgggctctgggggctttgctgggggagcttctggtcctgggggtacccacttgtgagggagtggggggacagctggaatagcgttgctcagtgcgtcctttgggcgctgttggggacaccctccctcgctctcccacaccactggcaccaggccccggacacccgctctgctgcaggagaatggctactcatcacacgctgtggatgggactggccctgctgggggtgctgggcgacctgcaggcagcaccggaggcccaggtctccgtgcagcccaacttccagcaggacaagttcctggggcgctggttcagcgcgggcctcgcctccaactcgagctggctccgggagaagaaggcggcgttgtccatgtgcaagtctgtggtggcccctgccacggatggtggcctcaacctgacctccaccttcctcaggaaaaaccagtgtgagacccgaaccatgctgctgcagcccgcggggtccctcggctcctacagctaccggagtccccactggggcagcacctactccgtgtcagtggtggagaccgactacgaccagtacgcgctgctgtacagccagggcagcaagggccctggcgaggacttccgcatggccaccctctacagccgaacccagacccccagggctgagttaaaggagaaattcaccgccttctgcaaggcccagggcttcacagaggataccattgtcttcctgccccaaaccgataagtgcatgacggaacaataggactccccagggctgaagctgggatcccggccagccaggtgacccccacgctctggatgtctctgctctgttccttccccgagcccctgccccggctccccgccaaagcacccctgcccactcgggcttcatcctgcacaataaactcggtatgccacaccactggcaccaggccccggacacccattctcctgcagcaggagaatggctactcatcacacgctgtggatgggactggccctgctgggggtgctgggcgacctgcaggcagcaccggaggcccaggtctccgtgcagcccaacttccagcaggacaagttcctggggcgctggttcagcgcgggcctcgcctccaactcgagctggctccgggagaagaaggcggcgttgtccatgtgcaagtctgtggtggcccctgccacggatggtggcctcaacctgacctccaccttcctcaggaaaaaccagtgtgagacccgaaccatgctgctgcagcccgcggggtccctcggctcctacagctaccggagtccccactggg

SEQ ID NO: 658 - DNA, 1809 bp, Homo sapiens
ctgggacttcatcccggacaactccaaggcagccttccaggctagcacccgtgtctactttgagctggaccttacagacccctacaccatctcggccctggccagctgccagctgctgccgcacggggaaaacctgcaggacgtgctgccccacgagctttactggcgcttgaagcgccacctggactacgtgaagttgatgatgccctcctggatgacgcccgctcagcggggcaaggggctctatgctgactacctattcaatgccatcgcgggcaactgggagcgcaagaggcccgtctgggtgatgctcatggtaaactcgctcacagagagggacgtgcgcttccgtggtgtgcccgtgctcgacctctacctggcccagcaggctgagaagatgaagaagaccacaggggctgtggagcaggtggaggagcagtgccatcccctcaacaacgggctcaacttctcccaggtgctgtttgccctgaaccaaaccctgctgcagcaggagagtgtgcgggccgggagcctgcaggcctcctacaccacggaggacctcatcaagcactacaactgcggagacctcagcgcagtcatcttcaaccacgacacatcccagctgcccaactttatcaacaccaccctcccgccacacgagcaggtgacggcccaggagattgacagctacttccgccaggagctcatctacaagaggaatgagcgcatggggaagagggtcatggcgcttctacgggagaacgaggacaagatctgcttctttgccttcggagcaggtcactttctggggaacaacacagttcattcgacattcctggcgggcaggcaggggctgggaggtggaccaccacacccgccgggcaggcccatacacagccctgccccccagagcccagcgccctctcctgaggggacctcgacgagcccggccccagtgaccccagctgccgctgtccccgaagcaccctctgtgacccccaccgccccaccagaggatgaggatccagccctgtccccacacctcctgctccccgacagcctcagccagctggaggagtttggccggcagaggaagtggcacaagaggcagagcacacaccagcggccgcggcagttcaatgacctctgggtccgcatcgaggacagagcccggcaaagggggtccgtgtggactctggagctcagccaggctggttgtgtggctctgggctgcccggtttgcctgctcaagctccttgttcccttctccattgtattaggcaaaatagacctgaaaaaatcagatctgagccccaaggcttctgcccaggacgaggctgccgatggtgactctgccatgtgcttcctcctttccagcaccaccgcctcaccacccccgctgcccctgcagcccacccacagctcggggaccgccaagccccccttccagctttcagacccagctacaacagcaggaccccgccagggcccgccagcagctcggcacccaccctgggccttctccccgccatcgccacccacccatcgctgtctgcttcctgcctgcatagccttgggccctcctgacctcggcccaccccaagtggagaagccagagaaatgacacaggggtcttcggccacacccaactgctcctgccaccacctccagggggtgcccaacacgtcgagggcagtccacatgggattggctagacactctagagctttactgtacccaagttacatcttcttttttgtagaaggatcttaatttcccatagtgctatggggctcttttgtaaaatac

SEQ ID NO: 659 - DNA, 2572 bp, Homo sapiens
ggcacgagtctttttttctcttatttgtgtctcatttcagatgactgtttaggttgaaacataaaattagacatcggtcatcgcaaatgtacctgatgtttaacatcatgcaccgtcaggacactcattagtgatacctgaactgatcacgtttcatgaaatccaaacctttcacactgtctttcaaaacggtcatctcccaatcctaaggccagggccctgaggcacccccgccccggctggggacactccgtacctggactctctctgttgctgttggccacagctgccggcacaggactttcttgaggacgtcgggaaggaggctgatggtcaccagcagcacgatggccagccaggcgggcccgctggacagcatctggatgaacacgtagtacatcctctggtagttgaggaacggccagatcactcctccccagagaagtgaaaagacaacgtagaacagcagcgacccccagatgacaaaatggttgatccaagtccagtagtgtgtgtccaatgcaagctttagtgtaactgtgaacaccatcacggtgaataccagcgttccaaacgtccagtttccaaatatctgcccgttgcttgtcacagttgtattttcaaacacgaaataagcaccaaagaagaacaccagtgcgtcaaacagtcccaggagcgtccagtagatgaacacgcgccagcgcagcagggcattcttggcgacgtccctgtacagggtcgggtctctcttgagcacgtcaatgccaacatgctgctccatgaggctgtacaggaggatggggagggaggtgaagctgatgttgtagagggtcagatacgcggtgtcgtacaaagtctgttgtgaaaacccacagaagaactggtataaaaactgagggaagatgaagcagacgttcttatagaagaagtactgcacgagctcagagatcctaatgtaataaaaatgcccgtgaacaagcagcatcttcttcaaatgcttaaactttgggattgcatagtcgctgttcctggcagcctggcggccttccttgccgatgacacctatgcccacgtgcgcttccagaatcatgctgacatcatttgcaccatcgccaattgctaacgtgattgggtgctcttttgaaaatttgattaatttaacaatctgagccttctgcaagggcgccatgcggcagcagagcaccgcgctgcagctccggcagatttccaggaagagctccctgtagttgccggaactcccgtcttctcgaggcttcattatcagagacagtgcagctccgtcgataattaaaccgtagtcctgcatatctgctgaaagtccggagaggttgtctctggtcaggctcccgctgtggcgcaggaccgtcttgctcagctcgaacaggacgtcgtgcaggctctgctcctcgatcctcttggtggtcagctccagcagctgcgtgttcctgcggaagagcttgcaggcgtagcacgtggccgcggccgtctccatcttgtctcccgtgagaacccagactttgatcccggccttctgcagggcctcgatggtgtctgcagctttctcctgcagccggtcctcaacagctgtagcaccaagcagagtaagatctttctctatttgctcataggcttctgctaactttttctctcgatcttgaagggccactttggcagcctgcagcagcttacaaatgccttcatattcttcttggatcagccttttataagcaacacacaaagttcggagcccctccactgcgttacgctccactctggctcggatctggtcaactttgccttctatcactcgggggaatatcgaagaatctgctcctttgcaaaacagataaatttctcctgtagcagattttacaattacactcattctccttctgactgagtcaaaactcaaaatttccagcaattcaaacctttcgatgtggttctccctgtttaatatctccatgtaattgtccttcagccttaggtaggtaaagccaagtctctggacaccttcgaccagcgccacctcgtcgggcgaggatgagatgtacacacaggatttccccccgtccggcgatttcctggggccgtctacgctgtcatcgtctttcacctggacggtgtggcagagacagagggcccggaaaaacagctcctcgcgctccctcccgttgacgctgggggacgagtcaatcatgtcgattcctgacgactctgggaggacctgcccgttgcagatgacgtggggcacgtagacatggccttcgatgcagcactccttgaactccatgttgttttccgtgagggtgccggtcttgtctgtgaagatgtactccacctgtcccagctcttcattgaggtccgacgtgttcaccagaggcccctcgccagtctcctcgtcaaacatgtcttcgtcccaggtgatgaagtaagagccgaggaacttctgcatctcgaccgtgacgtacatggacacagggatgatgtagttaaagaggaccatgaaggccaggaagtccgtgaatgccttgaggaacagattcctctg

SEQ ID NO: 660 - DNA, 3636 bp, Homo sapiens
atgcccatcaatgatagactggctaaagaaaatgtggcacattacaccatggaatactatgtggccataaaaaagaatgagatcatgtcttttgcagggacatggatgaagctggaaaccatcattctcagcaaactaacacaggaacagaaaaccaaacaccacatgttctcactctcccatgctcccccaagcctagccatagaaactagaatcctcttcccaagatacagaaaatgtggaagtgactttgaaatgggtaacaggcagaggtttgtacttcctagagacttggagagctcagaagacaggaagatgtgggaaagtttggaacttcctagagacttgttgaatggctttgaccaaaatgctgatagtgatatggacagtgaaggccaggttgaggaggtctcagatggaatgagaaatttactgggaattagagcaaaggtaacccttgctatgccacagcaaagaatttggctgtattgtgcccatgtcctagggctttgtgaaagtgatgatttaggggacatggatgaagctgaaaaccatcattctcagcaaactaacacaggaacagaaaaccaaacacctcatgctcttactcataagtgggagttgaacaatgagaacacatggacatagggaggggaacatccctttacttctccatgctaccctaacgactacccaaacagccaggcttgcatgtggacgctccgagcccccaccggttatatcattcagataacatttaacgactttgacattgaagaagctcccaattgcatttatgactcattatcccttgataatggagagagccagactaaattttgtggagcaactgccaaaggcctatcatttaactcaagtgcgaatgagatgcatgtgtccttttcaagtgactttagcatccagaagaaaggtttcaatgccagctacatcagaggtatgtaaaccaaaggcaacgccaaccttctgcttttatttaacatgttctcttaccaggtatctgttgcaaaaagcatctctattccagagctcagtgctttcacactctgctttgaagcaaccaaagttggccatgaagacagtgattggacagctttctcctactcaaatgcatccttcacacaattgctcagttttggaaaggccaagagtggctactttctatccatttctgattcaaaatgtttgttgaataatgcattacctgtcaaagaaaaagaagacatttttgcagaaagctttgaacagctctgccttgtttggaataattctttgggctctattggtgtaaatttcaaaagaaactatgaaacagttccatgtgattctaccattagtaaagttattcctgggaatgggaaattgttgttgggctccaatcaaaatgaaattgtctctctaaaaggggacatttataactttcgactttggaattttaccatgaatgccaaaatcctctccaacctcagctgtaatgtgaaagggaatgtagtcgactggcaaaatgacttctggaatatcccaaacctagctctgaaagctgaaagcaacctaagctgtggtgagtttgtagcgtattcctttttttttttttttttagcattattctatgtggggaccctctgtcaaggtagggagcccacaccgtgctctggaatctctttgctttctacttgcaattctgaggtaaaagtacagagcaaggtggcagaatgggtaagtgagcttgtaacttttcttttttaaaaaaattctttaacttctgggccaaatgacaagcaaccaatgaacaacaacaacagttctatccgaaatgtttccctaggttggtgctttgggcccttctagtttacaatgctaccaacaatactaatttagctcctaaaaaataatgagtccttggatgaaggcttgaggctacatacagtgaatgtgagacaactgggtaagtgactaatttttttataatatgcattttatacaactgtatattcagaaccttctgaatacgttcttccttgtccagacaagcctggcttttctgcttctcggatatggtaatattttcactgactcttgccagcaaagctacatgttatcagccttccctccaactgtttaagtaagtgagcagttttcctttatttctcaaggacaaaatgacatgacttcaagaacttaacctcagccaatattaccaacattgtggaacaggtcaaaagaattgtgaataaagaagaaaacattgatataacacttggctcaactctaatgaatatattttctaatatcttaagcagttcagacagtgacttgcttgagtcatcttctgagtaagtattttttttttcctggagagtaaattttattggataatgatgttaatcacatgtgaatattacaactcggaacttggctctcagcgtatcatccctgttaccagggacaaatgcaatttcaaattttagcattggtcttccaagcaataatgaatcgtatttccaggtaatgagccagtggtttctttcattttaattaattagttagacatataaaccaaacttacttgaggaatttaagtccagaaggattctgtattaggttaggaaggagcacagtttacttttcttcaacaaaactggacttttccaggtaagcacattcattaaattattgtttttcaactgcaaatgaagtttctttcaagtacaacctgatcgagagcaggttcgctgggccctttttaaaaaataaaacttatctattaaattcaagataattggaaacattactatccagaatctgaaggatcctgttcaaataaaaatcaaacatacaagaactcaggtaagaaaacgctcccaatagcatttggacagaagtggactatttaatatacaggttataccggtttgcagaaagcttgggaaagaaggtaatgatgaaaaacaatgtgtaacgacttccagaagtaatgctgcatttttcctgttgcatttcttccttctggcaacctttacctggatggggctagaagcaattcacatgtacattgctctagttaaagtatttaacacttacattcgccgatacattctaaaattctgcatcattggctggggtaagcctcttaaaatttttttggttttgtttttccctcatgaaaattgccaagtctatggaaaagaaagttatgggaaagaaaaaggtgatgaattgtaagtaataaaaactttttgtgatgagtagatatcctttgtttcctgaagtggagtcatgttttttctgaacattgccatgttcattgtggtaatggtgcagatctgtgggaggaatggcaagagaagcaaccggaccctgagagaagaagtgttaaggaacctgcgcagtgtggttagcttgacctttctgttgggcatgacatggggttttgcattctttgcctggggacccttaaatatccccttcatgtacctcttctccatcttcaattcattacaaggtaagataaattgtacatgaatagtctctgctttctaattttgtcatattttctgtttccattaatgagaattgggatgttttatttttcccagcatgggtcccctgtcaggaggg

SEQ ID NO: 661 - DNA, 369 bp, Homo sapiens
cagatgatcgactcccagaattccaaagaaacaaagtcccataaagctctgtctgatctggagcttgtggcccagtcaattatcatcatttttgctgcctatgacacaactagcaccactctccccttcattatgtatgaactggccactcaccctgatgtccagcagaaactgcaggaggagattgacgcagttttagccaataaggcacctgtcacctacgatgccctggtacagatggagtaccttgacatggtggtgaatgaaacgctcagattattcccagttgttagtagagttacgagagtctgcaagaaagatattgaaatcaatggagtgttcattcccaaagggttagcagtgatggtt

SEQ ID NO: 662 - DNA, 1222 bp, Homo sapiens
cagatcctcatctccctgggtagtgaggctcatcacagacaagcaaccaactgctgggctgccggtgccccccatgttggaacctgagttggagattatctcctaagcagatacctgcttccaaactggggatgtagggcttggaaactaaaaaatgccaggtctgagggagaggaaagaacaagtccagcaatacacagagctctgtgtattcagagggaagttggcagggttgtgttcgggcagagaaactccgagtggtacaaaggggacgtgcccagagtggagaaatcatgctaattgtctgcactagagctggagaacgccacccaaaatgaagagagaaaggggagccctgtccagagcctccagggccctgcgccttgctccttttgtctaccttcttctgatccagacagaccccctggagggggtgaacatcaccagccccgtgcgcctgatccatggcaccgtggggaagtcggctctgctttctgtgcagtacagcagtaccagcagcgacaggcctgtagtgaagtggcagctgaagcgggacaagccagtgaccgtggtgcagtccattggcacagaggtcatcggcaccctgcggcctgactatcgggaccgtatccgactctttgaaaatggctccctgcttctcagcgacctgcagctggccgatgagggcacctatgaggtcgagatctccatcaccgacgacaccttcactggggagaagaccatcaaccttactgtagatgtgcccatttcgaggccacaggtgttgggggcttcaaccactgtgctggagctcagcgaggccttcaccttgaactgctcacatgagaatggcaccaagcccagctacacctggctgaaggatggcaagcccctcctcaatgactcgagaatgctcctgtcccccgaccaaaaggtgctcaccatcacccgcgtgctcatggaggatgacgacctgtacagctgcgtggtggaaaaccccatcaaccagggccggaccctgccttgtaagatcaccgaatacagaaaaagctccctttcatcaatttggctccaggaggcattttcctccttgggaccttggtgaagacctggccaacaagggaaaaccccgtctttattaaaaatacaaaaaatgcccccgctttgggtgtaagggcctgttttcccgcgcccttcgggaggttttgaacagtaaatctcc

SEQ ID NO: 663 - DNA, 3818 bp, Homo sapiens
tttttttcgctatctaaggacataactttattggaaacaaagagtggggtgcagaagatggctaggagtcaggctctgagggaggtggtggcttctcatcatcagggggacaatcgatgaagtcggccagcatggcagctgtgtcatcctgctccttttcctggagagcttcggcctctgtctctgtctccatctcttcttctgcaggtgtctctggtgggggctgcaccttgtcactcccatcctcagtctcctcttccaacagggttgggggagcagagggctcttcttcaacaagctcctggggagggggccctgccgcagggctttccccttccctctccacctctccctgggaggggagcgcttcaggggccagggtgggagctgtgtcagccccacgctcctcctccgtccctggctcctccacttccaaaagcagcccgggttcgggttcgggttctggctgcacctttgggggagactcagggggaggcagagctggaggcagggttgagggtggaggtgcaccttcttctacctcccctcctgctgtgccaaactccaggtcttccacctcttccagttcttcttcctcctcctcatcctcctcttcttcttcttcctctaactcaccttcttcttcctcaaattcttcctcaaactcttcttcctcctcttcttcctcttcaaaatattcctcttcatcctcttcctcttcctcaaagtcttcctcctcttcctcttcctcaaagtcttcctcctcttcctcttcttcttcttcttcttcttcctcttcttcctcttcctcctcctcttcatcactgctgttgatattaataactgtcaaatcctcttccagggctgggggtcctcccccaccaggagtcccttcagggaccaactggggtggagggagcgtcacaggaccaggaacaggcggcggcggaggtgggggtggcgggagaggccctggggctgcaggaagttcttcaggctcctccttcgctggcacaggaggggaggctgttggtggcccagtgggggctatagggggtggtgtggcacctgagggtggtgggggtggcagggggggaagcccctcgggcacgatcaccacgctgtcatcagagtcactttccaaggagatctccacatcagatgcctcctccttgtcatagtggacaaaggctggtctgggcactctccccccaaaagtttcatctgggggtatagtaggtgggggagtcccactaggggcaaggatggggtcctcatttgagcctgcccggtggttctcagggccaggaagaagccggggaggacagacactaggcctggacagaaggcctaggaggttggctgtggtggaggtccagggctccgagggcacagggcctgctgagggcatggggcctgctgaagggcatggggcctgctgagggcatggagcccactgagggcatggggcccggaggatggaacggtggggccctgaagggcgatggggcctcaggagggggactggagcaggtgtggggcaggtggggcccatgggctgcaggggaggaacccgggggtgggtcagagcagcacaggtcaccagtgcttctgagcaagaaagaggagacctcaaggctatcttctcgctggccgagggagaaggcttgcagggcacaggcaagaggaggtgggcagcgaggagatggggccagcagcagcgccagcagcaggcagtagagttcacggcggcagcgggagctcgtgtacggggagctgcctaggacctcaccctgctgtacacccatgaccagggggaggaccaggtcatgcagtctcctgtgagtctcctccttgatgagaggcccacacatgaggatggtccggctgaggcctctgagtgcagccgcacacacgtcgctgttggcattgctatcccctttccggtggcttggcggggccatagcttcccccacatccagctttagcttcttgggggcgctaggcttcccagtctgcaaactcccatcagggctcccccgcgggctacgcagcttaagggcatcagctggcggggagatgtcgctgagcaggtgggtgagcagggcctctccagaggctcctccctgaagcattcccgccgaggccccacaaacctgcacccacagctctaatatcgcatacaccttggtccgaaccgtgctgtaaggcctctcctggcctggagagagggaatctctaccgatgctccaggaattgaggacctggggaagcaggcggccgatcaggatcccaaagcgcaagagccggcttccacacgcgaggatgagtgcagacagcaggtccaaggccttcaaggtggatagagggcagcagcagcagccgcagggaccatctccatgcaagctctggagaaaaaaggggcagagataaagagtggaggaagaaagtgagagccagagagagacagaaacagggaatgaccatttacatatgtacacataggtaagaaacccaacccctgatctcatctctcccaacaaaatcaaacccctatcctctaaaatagaccctggatggaaggtaagaaggatggctgggcctctcagcaatgactcagctgagtccccaaattcaccctcccccaaggaagcatttgctacactctgacactgtgctcctgtgtcacgacacataggaagtgatgttatttggacaaaagtagaagctctctgggacggactccaggatgacactgtttggggagactcaggtccccagtactttcctggttgcctggtatcctgagcaagggctctgaagagatgacaaatcccacttacaatattcttgctactgacgctgagggtccggcagatgaaatccaggatttcctgcacagggacggacacgggagctccaaactcagagctgagcatgagccctaggcagcgggccagtcccgaaaacctctgccgaagctggagaaggacatgggcatcaccatcttctgaggacagcagcatctccaccccagggccttcattctgcacaggagcagtctctgctccctcgtacagggcccccagcagggtgtgcagtgaggccagcagactgtgtagctcctgctcccagctctcggtgtgcttcaggccttgggaaaagccagcccctaaagagggcagccgggaataacactcacaggccaactgttggagctgagggctcaaggcatccaccctagacagaaaaaatgaggccagcttgcctttgagagaaccacaagcccgagggaaataggtcatacaagccttcattccttccaatgctgactgctcacactctggcctgaggcccagcagggaggtgagaaggccagggaggtggttcatggagatgtcccggaacagtgcaggcagctgggctgcatatcggaggaggtccctcaggacagccacggccagctccattgtggcaggcgggtcctgggtctgtaacacctgctgaatgctccgaagccaagacacacagtgctgctggaatagctctgtggggctctcccctaccagcagggacagcagacacaggccctcaaaccgagttttgatggaactgagacgtgcattactgagactcaccaatgccccaagagctgaaaggttctgggccccgcccaccgacccatgcagccgcaataggcacatgagcccgggcaaatgtggggccgagcggtttgggggatgcaccggagcaacggcagaccccgttcgaggttgcagcaaaccagaaacactctccagcagcagcaggcggagccg

SEQ ID NO: 664 - DNA, 933 bp, Homo sapiens
agcggccgctcgcccgtgttgtgtgtccccggtgtcaccgagcgtgttgtgtgtccgtgcggcgcggcgctcgtgtggctccctcgcgcccaccacgctggcccccgggccccggctcgcccttcccaggcgccggctgcagcagagtttcagaacaagcttcctggaacccatgacccatgaagtcttgtcgacatttataccgtctgagggtagcagctcgaaagtagaagaaagtgttgccagggacggcagtatctctttgtgtgaccctggcggcttatgggacgttggcttcagacctttgtgatacaccatgctgcgtgggacgatgacggcgtggagaggaatgaggcctgaggtcacactggcttgcctcctcctagccacagcaggctgctttgctgacttgaacgaggtccctcaggtcaccgtccagcctgcgtccaccgtccagaagcccggaggcactgtgatcttgggctgcgtggtggaacctccaaggatgaatgtaacctggcgcctgaatggaaaggagctgaatggctcggatgatgctctgggtgtcctcatcacccacgggaccctcgtcatcactgcccttaacaaccacactgtgggacggtaccagtgtgtggcccggatgcctgcgggggctgtggccagcgtgccagccactgtgacactagccagtgagtctgctcctttgcctccctgccatggtgcggtccctcctcatctctcccaccctgaagcccccaccattcatgctgcctcttgttactcttagcataaaatgggccttaactgcagaaatgtcaaatcagaacagtagctgccttagtaatgcccagtgatgggggaccccttgtgcccttggaaaacctcactccaagtagaggctgtatctggagtgagtgtctacagagaggg

SEQ ID NO: 665 - DNA, 714 bp, Homo sapiens
ctaggagcctcctaatgcagtcttctgcacagtcctggggactgactgactgaatcacacctctggggctgggggctgctgacatgtgtgcctttccttggctgcttcttctcctgctgctccaggagggcagccaaaggagactctggagatggtgtggatccgaggaagtggttgcggtccttcaggagtccatcagcctccccctggaaataccaccagatgaagaggttgagaacatcatctggtcctctcacaaaagtcttgccactgtggtgccagggaaagagggacatccagctaccatcatggtgaccaatccacactaccagggccaaatcctaactatgcttctgagaagccttcaacagccttctgcctcctggccaagggattgctcatcttcttgctcttggtaattctggccatgggactctgggtcatccgagtccagaaaagacacaaaatgccaaggatgaagaaactcatgagaaacagaatgaaattgaggaaggcagcaaagcctgtctccagccctgcctgactgctccttgggaaccccagtcctgagcttggtttcttcccagcacccagagaatccttcctcagctctcttctttccaggggaaggaggtgctcaggggtgggtatccagagagccatacttctgagggaagactggctggcaataaagtcaaattaagtgaccacaaa

SEQ ID NO: 666 - DNA, 461 bp, Homo sapiens
gtggtggaattcccaccatggctacctgggccctcctgctccttgcagccatgctcctgggcaacccagcccctgcctccgcatctgcgtggtgaaggccattggccctcatcggtggatctgcgtttcctcgggcctacactgtctaggattgtgcggggctggtgagagaacaagatctcttccgtgttcaaggcagacttcctgccccctgcaccctgctctctcccaggccttgaggtctggtcttctctcgtctgagccctgagtactacgacctggcaagagcccacctgcgtgatgaggagaaatcctgcccgtgcctggcccaggagggcccccagggtgacctgttgaccaaaacacaggagctgggccgtgactacaggacctgtctgacgatagtccaaaaactgaagaagatggtggataagcccacccagagaagtgtttccaatgcc

SEQ ID NO: 667 - DNA, 919 bp, Homo sapiens
ggaattccccagcttgaaacggtggagtccgggcaaatgagctctgaggacggcttctgggtctggccgtgacccagattgcagtgagagttcccgcaggccccgcctctttctgggcctcgtgtctcccagccgccgggccgggtgcgaggccttacccctctgatctgctgcaggatgggcctctccgctgcggccccgttgtggggtcccccggggctgctcctggccatcgccctgcacccagcgctgtcggtgcccccgcgccgggactactgcgtgctgggcgctgggcccgcgggcctgcagatggcctacttcctgcagcgcgctggacgcgactacgcagtgttcgagcgggccccgcggcccggcagcttcttcacacgctacccgcggcaccgcaagctcatcagcatcaacaagcggtacacgggcaaggctaacgccgagttcaacctccgccacgactggaactctctgctcagccacgacccccggctgctcttcagacactactcgcgtgcctacttccccgacgcccgcgacatggtgcgctacctgggtgacttcgcggacacgctggggctccgtgtccagtacaacaccaccatcgcccacgtcactctggacaaggaccgacaggcctggaatggccactacttcaagagactaagccatctttcctctgtccccgcctgcagcgtcctctttgtagccactggtttatcagtccccaaccaggttgacttccctggctccgaatatgcagagggttacgagtccgtgtccgtggaccctgaggactttgtaggccagaatgtgctgatcctgggtcgtgggaactcggcctttgagacagcagagaacatcttgggtgtcacaaactttatccatatgctcagccgctcccgggtcc

SEQ ID NO: 668 - DNA, 2049 bp, Homo sapiens
ttttttttttttggtgagtttcaatattttattaaaatagcatatttaaccatggttaaccaagaatatgttaactttgtgccccccaacctgcccccgccccagatacgcagcaaaacacagtagtgatttcaaatatccttgatcatgaccaacaggaatatttcaaagtcaagtttgcaactcaaaagtagaccttggaaaaactttgaattaaaagagaaacataaagctctcacacagaattcttttatctgccctaaaatcaatgccggcgcaccaccacctgacaatactgctaggatttttctttatgcatagtataacgactcatttattaagtacccacttttataaataaaatcggcattttttgtcccgcttaatgttccttttcagcttcacaaagaaaccagtaaataaaactgtcaacgacagtcacaacatatgctctcacagcaagataaaaaaacttgaaaatacgcagagatgcatctacgctattttacataaaaagagagattcaaaaagtgcaaggcaaaatctgcagttttttgaggggagcttttaggcacatccatttcattaaagcaagcttcagaatgaaattccagtttgttcttcatgacacctgttaaagtctttctttaaacgacaacaaaaaaaagccaaaaatacatcccatcaagtgtacaatggtagtcttgtgtcctaaaagtgaggagttcagctgtggcgagtccgtcctttctttattctggcaggctttggtttggggatgtactgattatttgcctggtactcgagttctttacggaagtagtgaattgctttgtttaaaccttcctccagcgggaccacgggctcccaccccagcatcagctttgcttttttgatgtctggttttcttttctgtgggtcatcctgggcttcggagagaaactgaatttcacttccgctaccaacaaggtttttaattaactgagcaaattctaggattgtgtgttcttctgggttccccaggttgaccgggctgctgacgttgctgttcatgagagccacgaggccattcactagatcgctgacgtactggaacgcccttgtctgagacccggatccgtataccgtgagtggctccccctggagcgcctgcaggatgaagttgctgactactcgcccatcgttcatgtgcatgcgtggcccaaaggtgttgaagattctggccactcgcacttccacgccttcctgcttcatgtaggcatagcacatggtctctgcaacacgtttgccttcatcgtagcaggcccgaggtcctattggattcacgtggccccagtaatcctcactttgagggtggacttcaggatctccatacacctccgatgtggaggccaggagcagacgggcaccgactcgttttgccagccccaacatgtttaatgtcccaatcgtattggtctttaatgtcttgataggattatacatgtagtttggaggggaggctggagatgccagatggtatatctggtcaacctcgatgtagaggggctccaccacgtcgtggttaatcaactcgaagttctcatgtccgatccagtgctccacgtttctcttcctgcccgtgaagaaattgtccaccacggtcacctcgtggccgtccatcatgagtttgtcagttagatgggagcccacgaaccctgcgcctcctgttatcaaaattcttttccgatccttttctgataaaaactttactggtgggtatttctgggtaaagcttttttctaaatctctgattttctctcttagtggttcaaccatctcttcaatcttgctttcaatttttagttcaccattttcctggatagacctgttgagtagaaagctcatattaacgaagttgccccaaacagaggcgacgtaggccagcaaggcgatgcccagcagcagcttcatcctcctgcggttgacggcagacacgaggcgcagcagcgccttgctcaccatccccgggagccgcgcgggtccagggccctgccgcgcgggggcccg

SEQ ID NO: 669 - DNA, 1774 bp, Homo sapiens
atgtgtgatatgtcccctctaggaatccccagacttcctttcctgacatacgtgagctgtctgacgcatactccttccagtttggtcacagactacaactcttgcctgatttcatcagcttcatctgcacgaaaaagtcccggatatcccataaaagtccacgaatttaaggaggctcacatgcttttgtaagttttggtaacatctattccttgaattttcagtgacacagcaagaggtacaatttaaaccagaatccctctgtaagaagctgttctcagatcataaagaactggagggtttaatgaagaccctgatacatccttgttctcaggggattgtgatattttctagaagctgggctggtgatgttggcttcaggaaagaacagaatgtcctgtgtgatgctctcctgatagcagttaacagccccgtggtactctatacaatcttaatagaccccaattggcctggaggacttgaatatgcccgaaacacagctcatcagttaaagcagaaactgcaaactgttggtggttacacagggaaagtgtgcatcattccaaggctgatacacctgagcagcacacagagtagacctggtgagatccccctgcgttaccccaggtcctacaggcttgctgatgaggaggaaatggaagacttgctgcaggctctggtggtggtctccctgtcctccagatctcttctgagtgaccagatgggctgtgaatttttcaacttgctcataatggagcagagccagttgctttctgagagtcttcagaagacacgtgaattattcatctactgctttccaggagtcaggaagacagccctagccataaagatcatggagaaaattaaggacttgtttcactgcaaaccaaaagagatcctctatgtttgtgaaagcgactccctaaaggattttgtgacccaacaaaccacctgccaagctgtgaccaggaaaactttcatgcaaggggagtttctaaagattaaacacatagtgatggatgagactgagaatttctgcagcaaatatggcaattggtacatgaaggctaagaacatcacccatccaaaggcgaaggggactggaagtgaaaaccttcaccatgggattctctggctttttcttgacccttttcaaatccatcacgcagatgtcaatggccttccccctccatctgctcagtttcctcgaaaaacaatcaccagtgggatccactgtgctctggaaatagcgaaggttatgaaagaagaaatgaagaggatcaaagaaaatcctccctccaacatgtctccagacacattagcattgttcagcgagactgcctatgaggaagcaacgtgtgcccaggctctgcctggggtgtgtgagacaaagactaatctgacaacagaacaaatagctaactatgtggcaagaaaatgtcacagcctgttccagtgtggctatctgcccaaagatatagcaattctgtgcaggagaggggaggacagaggacgctataggcttgcactactcaaagcaatggaattaattgagacccacagaccatcagaggttgtgtttagcccggccaccggtgtttggggaagtcacattgttttagacagtattcagcaattttcaggcctggagaggactgtcgtgtttgggcttagtccagaatgtgaccagtcagaggaatttcataagctctgctttgcttcaagagccattaaacacctctacctgctttatgaaaagagggcagcctactga

SEQ ID NO: 670 - DNA, 480 bp, Homo sapiens
  misc_feature (1)...(480): n = a,t,c or g
gatataagaagcgaaangaattcgatgaccttagatcagcgtcgtggaattccgccgccacagcctcttgccctctgacctgcaggtatcaggagatccatagctaagcagactggacacccgggaagctgggaaacgggactgtggatattcagggatgcggccatagaattctctccggaggagtggagctatctggaccctgctcagcagaatctgtatagggacgggatgttagaaaactacagaaacctggtctccctgggtattgctgtctctaagccagacctgatcacctgtctagagcaaaggaatgagccctggaatgtgaagaaacatgagacagtagccagacacccagctgtttcttctcatttcacccaagacctcttgccagagcatggtataaaagattcatttcaaaaagtgatactgagaagatatggaagctatggcattgagaatttacaattaaagaag

SEQ ID NO: 671 - DNA, 2231 bp, Homo sapiens
aacaaaaatggtgaacttaagccccagaatgcccataattatagtaagtgtaaatggtttaaatacaccaatgaaaatgtagagacaatagagaaaagtcgattcatctatacttttgcactttttgttctttcttctttccttccagatgaccccaaatacctcccaccttttttccccttatttctatttttttggtgtgcttccgtcagctattccttaaaggtgggtattataggaacccattctcttagtttttcttcactgataggagattgggagagtaaagaaaaaaaatgtggagagcggacatcttgtggctgtgtcgtgcgcgtgagccccgtagggccggggaggcaccagctgccgcgcggggaggaggccgaggccgcagcttgagggaggccccggcccctctgcgcctgtgtctggcagagctggtgtgagacgagacaatcctgccccgccgccgggataatcaagagttttggccggacctttgagcatacaccgagagagtgaggagccagacgacaagcacacactatggcgctgaaacggattaataaggaacttagtgatttggcccgtgaccctccagcacaatgttctgcaggtccagttggggatgatatgtttcattggcaagccacaattatgggacctaatgacagcccatatcaaggcggtgtattctttttgacaattcattttcctacagactaccccttcaaaccacctaaggttgcatttacaacaagaatttatcatccaaatattaacagtaatggcagcatttgtctcgatattctaagatcacagtggtcgcctgctttaacaatttctaaagttcttttatccatttgttcactgctatgtgatccaaacccagatgaccccctagtgccagagattgcacggatctataaaacagacagagataagtacaacagaatatctcgggaatggactcagaagtatgccatgtgatgctaccttaaagtcagaataacctgcattatagctggaataaactttaaattactgttccttttttgattttcttatccggctgctcccctatcagacctcatcttttttaattttattttttgtttacctccctccattcattcacatgctcatctgagaagacttaagttcttccagctttggacaataactgcttttagaaactgtaaagtagttacaagagaacagttgcccaagactcagaatttttaaaaaaaaaaatggagcatgtgtattatgtggccaatgtcttcactctaacttggttatgagactaaaaccattcctcactgctctaacatgctgaagaaatcatctgagggggagggagatggatgctcagttgtcacatcaaaggatacagcattattctagcagcatccattcttgtttaagccttccactgttagagatttgaggttacatgatatgctttatgctcataactgatgtggctggagaattggtattgaatttatagcatcagcagaacagaaaatgtgatgtattttatgcatgtcaataaaggaatgacctgttcttgttctacagagaatggaaattggaagtcaaacaccctttgtattccaaaatagggtctcaaacattttgtaattttcatttaaattgttaggaggcttggagctattagttaatctatcttccaatacactgtttaatatagcactgaataaatgatgcaagttgtcaatggatgagtgatcaactaatagctctgctagtaattgatttatttttcttcaataaagttgcataaaccaatgagttagctgcctggattaatcagtatgggaaacaatcttttgtaaatgcaaagctgttttttgtatatactgttgggatttgcttcattgtttgacatcaaatgatgatgtaaagttcgaaagagtgaatattttgccatgttcagttaaagtgcacagtctgttacaggttgacacattgcttgacctgatttatgcagaattaataagctatttggatagtgtagctttaatgtgctgcacatgatactggcagccctagagttcatagatggacttttgggacccagcagttttgaaatgtgtttatggagtttaagaaatttattttccaggtgcagcccctgtttaactgaaatttctcttcaccttgtacacttgacagctgaaaaaaaacaacatgggagtaataat

SEQ ID NO: 672 - DNA, 630 bp, Homo sapiens
gccggtgtcgacttactagctgcaagcctctgcctgccttcctgcgcgccgttccccgctagtcgctgctgctggcgcgcactcgccgggtttttcctcccacggcctcgagatggtggtgaatgtggcacggaggagccgggccttccaacccggtgggcccgagctccgaaaggccccctcggcagtgagaggggcgggagcccgcgggggccgcgcccttctctcgcttcggactgcgcaacgctgcgctctgggctgacaggcggataaaacggtcccatcaagactgagaaaaagcacaccagctattggcacagcgtgggcagtggggcctacaggatgactgacttagtctacagagatcccggcgtacttaagcagatgaagactcttaagatgacagaaggtgatttttctggtgatcgaggacttccggggtaatgacagtgatgaaatgcaggggacctggtaggtttcttttggagactaactgggggctgcctgggtgggacagaacagcatgtttccaagggctgtggctggtcatagccatgggatctccaactgcatgcaagagcaacctggaaagactttgacagcgcaggttgcccccaagtttcctggcag

SEQ ID NO: 673 - DNA, 3772 bp, Homo sapiens
  misc_feature (1)...(3772): n = a,t,c or g
ctactatggagatgtcatctgggagaatctcagcgtggaggcgggtggacttttaggagtaacgcagcagctgtcatcttttgaaacggagttcaacacacagccgtatcgtaaggtggaaggaaacttcaacccttttgcctctccccaaaagaaccgacaatcagatgaaaacaacttaaaagaccctgggggctccgagttcgactcgaacagcaaaaacacatgggctcctgctcctgacacatgggctcctgctcctgaccaaactgagcaagaccagaatagactgtcccagaactctgtaaatctgtctcccagcagtcacgcaaacaaccttatcagtagtgacttacagtaaggggctccatgggccttaccccttcggccagtcttaaacgggtgtcagcaagaagaaaaattaacaaaagacagaaggcctgactttggggggttagggcaaggggttcctctgggattgcagaccacatcgcacagacccctgggctctgaccccctctcatcccggaagaagaggaagaagcagaacagactagttttgagtaaacttcagtattgcatgtgtggaatgctgaatcacaggaatggtgttgaggctaccaagaagaaatccatgcagccactttgggttttggtataggcatcagtctaacaagtcattaggtcactcgggaagggggaaaaagtttaaaatgggggaaaaaaagccatctttttaaacaaaaattattttgcctacagaaaggttgtagtttttgaggcacatgttaatttttttccctctttccccacttttatttttttaaataagggataacatattctttatagaatagtgcttgttcctggaagagattcaggtgaaaagttggcgtggcatgttttgaggactctgcggatcagtgcctacaggagtacatcctgccctgccacatgactccagaagtctctgacccccatttgtttttaaatggcatcagccaatgagttatcacccttttcctcctcttttctctttaatcttctgttgatttacacctttgacatttgtattcgtcaaccctgtggcttgttagcatcagaacctctctgaagaccaaaacttccctgtgtggccagcagaggaagccttgaggatagatctcgggtgacgtgggattttctaagcctgagaggtgtccttctgcacacccttgtaacaattaaaattgcttttcttccatgtttttcttggcagagagaaatgccatcatgcttactgctcttttggattcttcatgcagtggcttcccatttgctctgggaacagtgcctctgtgctggttatatgtatgcaccacatgtgcacacacgggtgtcggtgcaactcaccagcaggtgtgcagtaggcaagcttgaaggtggcccatgcttctctgttgtcacacaacacctttccctgtttctcttcagttgtcctctgatattttcacagcctgttagtggcggctgatctgtagaggtatgaaaatacagccccaaagggggaatttgtcatggggaagggccagccactggactacttgatcttggagaccacattttagatggaaatgagaggacctccacagccccgcctccctgccaggatgctagattattggctgggaggtgggcaagtggcagcccacctgaagcaagaggctgattgactggctgctcactcaggcaggtggccctgcccctggcatcctgtaaattctgagcaaggttgagatgtggatatctccatgggaagcttgaacccaggctagaacagctgtctgccaaagatacaagaatatgcaaagtccctcttacccccctccttccctcaagtcttagttggtttgagagccagggatatggatccagggtgctgttgcagggtcacctgcctgttaccacacccccatccagcttgggtggtgggtgagggtgtgagacaggcagggagaccaggtaatgagtggctgcaaggagtcattatagcctggggtgtggggtnaagggtctgcctgcctgtttcatgtctgggtgtctgagttccaaaaaaatgtgtgttgtttgttcctcctcatcctcttctgagactgttgttttttttagagcttgattgtgggagaaaaagcttgtgttgaaattccctcttcacctccccaccccccaaaaaataaaagggggcataaactttattccactggagaagccctgggggtgggctggagccagcctgctgagaagcgtggtgcagctgggtctgggacttcactagagcttactctggagcacctatttttctgttgcacatggggagtgctccactccctagcagagcagaggggaagtctctggccagggtacccaacgccacaggcctcaggatggctttttgtctggaggcctcattaggcccagacttctgctgctggtaccagtctcctgagacactgcctccctggagcccatgcaatgcccagcttgtttcttactgctttagtaagcccttgaaagcaagcacatctccactgtcccctgggcaggattgtggggaggcttcacaacccctgctttcctgacttcctctttcttgcccaacactggggtgcccctttcccagttttcccagcaaggggtttcatgggccaccgtcagtggggtctgggcctgcaagaagtcgtcttggctcttcctcttgcttctaggcaaccacacttggcaagttaaatgtcccaagcaccttgtctcccttcccaagaacaaaccatttctgtgcacatccttggaggcgagatgagctccttgcagagggccagagtaagtgcaagtcatggagtgcaggcagaggggtccatggcttccccagcccagggagggtatcagtatcattcattctctctcccctcactgggtatgggttcagagcaatgcctagggcccctctctgctcccctgcctagtggggtggtagtggctacctctcagccccaatagtccctgctcctcttagaatcttcaccaagtggcaggccacctctgggcaggaccacctgcgtctggcacccaggaggtgaggcagacaccatggttagggtgatagggtctgaacccagttggggagacagaggggttcagacttgggaagaatctgtcaatgtgcatggaatgaggtgtttgtgtgtggatggatgtgcacgtgtgcatgctttttttctttttgccgtgaggacagttgaatttggggcatttttctacaagaagcagtcaagccttctctcccccataaggactggctgttaaccttaagccccatcaaaggttacttccaagccctggaagagaacctcaccaaaacaagctggtcgtggcctgaagggtggccgatggtgggaaatgggcatgagaataaatacctccccaaattcaatcttgagcccagcaggacgaggatggtagggttgccagggctcagaagtgcaagctgattactcaccgccaccctggcctcggccgcaccttttccttttgtttcctttgggtgaatgcaggagcagcagtggctgcccttcccaccttggnacagttggttgttgtgtaagaaaaccagcttggatgtttggtgggtgggggcctcattggtgcctaggaggaagataaagaagaggaggtttttccttattgttataaatgaatatttagtaagattaaattaacacacaccccaaaaaaaaaa

SEQ ID NO: 674 - DNA, 861 bp, Homo sapiens
ttttttttttttccttttaatacctgaatgttctgcgaaaactgaaattgttacaggccaccctgccgcggccagggcgagacaggctgggcccacccagaggtagagagtagttttatgttttttaaaaatttttttaagttttttttttttttcctcctattacctgagtttcaggcgtggttcccacgccgtctgacaaactccagagaaactgaaatttcacacgtcatgaatgaaaggctgagtttacatttgccaaggaaaaaaatgcaaaagcacaattggggaaaaaagggacaaggtgggtaaaacatgataagagaaaggaaattcaactgtacagatgcgtgacccttaacaacgaccccagctgccccccgtgccccgtgcccaccctcccgcctttctggacagccacttacgggtcccacggaaggttccagaagccgcctttctcccaacatctcagagcagggggagcccccgttggccttgactgtggggcacccactcagtacgcagccaggccccacggtcccaagtgaactagaacccatccagggtcctcgtggctgaggggactgcccgaccccctcccagtctgcataagggggggtgctgagctgcaccccagaaagccacaccgaatttaaacccccaccgacaggcggtggcaggagatgggcacggctggggttgaacggggccacctgaggcagggaggagcctctgcagacacggcttcctgccgagtatccaggaccgggccccatagaccccctgcaaccgcctcccatttccacggccagcatggccactgccttcagcgacttccttctcctgggccgggacccagcc

SEQ ID NO: 675 - DNA, 1629 bp, Homo sapiens
accgggttagagagttttcagaccttactgcccattttttattccatagtggagagaaaccttatgaatgtaaagaatgtggcaaagtcttcaggtacaagtcttctctaaccagtcatcatagaattcatactggagagaagccttacaaatgtaacagatgtggcaaggtcttcagtcgcagttcaaacctggtatgccatcagaaaattcatacaggagaaaagccttacaaatgtaatcaatgtggcaaggtctttaatcaagcatcataccttacaagacatcaaataattcatactggagagaggccttacagatgtagtaaatgtggcaaagcatttcgagggtgttcaggccttactgcccatcttgcaatccatactgaaaagaaatctcatgagtgtaaagaatgtggcaagatcttcactcagaagtcttccctcaccaatcaccatagaattcacattggagagaaaccttacaaatgcaccctgtgcagtaaggtcttcagtcacaattctgaccttgcacagcatcagagagttcattcatgagagtccctacaaactgtgtatggcaaaaccatcatcatgagttctagcattaatcaacatcagtgagtccatactaagtggaaatcatataaatgaaatgtatgtgacacaggctttatcaaggcctgccaaatcactggacatcaccacatcactgtggaggatgaaagcacacagatgaattgtgtgtacttgggctattattcaaggaccattgctatagaacacgataggatttacacaagaagtaactctgtctctggttctctgatactaatctatgatattgcatgatgcagaataatgctaagtcaaaatatgttgaatctcatgacctgatgtatatcaaaggtgcaacggcttgtaaatgaccagttttattcaggctataaagcattcaattatttggggcttatagaaaaggctactttactctttgtgacttcgaaatcttttcatgtgccttccatacaggccattcactgtggtccctgggaaagaatcagtaggatgacagggctgacttcattagctgaggattatttctatccaatttcctgatgaaggacattgccttttgagattaaatattgtctgatttagagagcatggaggtgggcagagtaacataaaactgatgaccgtcatcatactgttgcagttagcacactttctcctgacataagtgcacagagcttcagtgtccaccaactgaccatgaaatagagtatgctgtaatcttaaggcataggttattagtgggaagagagtaataggttgctagtgtctgattatatggtagaaataatgcaaggaaaaaggtagccaccttctccattgaacagcagtacctgctgtttagcaaagactgatgagaagtagacttttttttttttggaaataaagtctaattttgttgcccaggctgaagggaaggggggggtttttggttaatgtgcccctccgcctcctgggctaaagcagcctttttgccttaccctcctaagaagctgaaactacaaacgggcccccccacccccagttaatttttgtttttttagaaaagacgggg

SEQ ID NO: 676 - DNA, 7251 bp, Homo sapiens
  misc_feature (1)...(7251): n = a,t,c or g
tgttggcacaagattacaacctacaatttcaatgcccttccctcctacacagctcaaatggaaggaaactgattaacacatagaaaggaacggcaggctcacaggtttaagcatttgtttttacaaaaaggagtgggatatgggggtggtcaagttttacgggtaataacaacattctctctagatggcagggggtaagtctgcctgtcctccattgctggtaccacataagggatacattagtaaagtaaggtaagggttatatgtgtggctggcctgttctttagagaggaaggtgggatggtatctgctgtgtacctgtctcagaccaaacctggggctggaccagtgcccctttcttctcagccctcctccacagcctgactgtactgccagccgcacccatgagaaggaagtgttgaaggaagcctgaagacatccacctcgagaaaaggaaacaggaaaactattccttccgccttctctggaccaaattcactccctcagctccagagagtgctgcaaaaatcttccttagggacgctgtgaagacacggggaagaggccagccctgagcgggcaagaagaaagcttgaactttccatgcagtaccaagcaaggctattttggaaacaagcaaacaaacaaaaaatggaaaccaacaccatataaccacaggttgggtagctcctaaatcctggacagcatttggattgggggtaagggcaattttactccagctccttgtttataacccgcacaaggtgccgaggttaaggaccacaactgacctctctttccctacaagcaccattccttggattcccagttttgttgagctcatttgaggtcatccttgccatcctcttaaaaaatgacacagcctcttggttattccattttctatccctttctaaattatgaaccactctctaaacaggagatctatatatgctctcatcctgcaacccaagagattagggacctaatgatgagaaggctaacttatttgctttcctgggtggtcctgatggaaatgaacagcagcagagttctggtgggatagagcagtctagtctgagccactgtgtgattccccaggggactggtccctgggtacatgggtccctggctctctgtctcagttccacagatattactcaacttggccatttacgcctcagctaaaacatatgagcatgagggaaaagggacaagaaatacttttgtcctctagaaaaacttaactcaatacatcttggctactttgcctcaacccacggggttccctggaaacatttgttgaacttggccaagaggagattgtatatggatggcacacctggaaaaggggagaaagcacactagttcatctcttttataagtagaatggtcccagggatgttaacctttctgatgctgatagtagatgagtggagtggggtaatcgtgaaaacttaaaaacccttaagctgtttggagactaccaccacagtggagcaaaccaaggtggggcctcactgccctcctcagagcccatccctgaccatgtcattggataggatggaagacaaagtcttgaaatggaggctgggctggcaaaagtaagtatgaagatgctactactggccttccacttcctctctctgatacacctaagaaggtgagagacactagcttcaattccattttacaacagttctcaacaacctgaaatattcttgacttccttaagcacatggaaaactggtaagctatatctttctaactgaaattttacttattctaaccaaccttttctttgattatcaaccagtttgacagtcttcagatcacaaaacaatagaacagacctgacatttacaaaactgtactacatacttatttcttttacagtagagctgaccaattacttttctaactactaatgcaacaccatgccactgggccctggactctgatgtttctgatccctgagcaacacatctatgtccattcacagatggaaatgaaagagtgagattctcagaggctaaacaacattctgggaagcaaattggatttttgaagggagagtcctccttagaaaattctggagccaaacatgctcccagtcacgagggaatggtagccgggccaggtttcctgtctgtggctatagctcccttcctgaactccctctgtctttgggaaggacacaagctcttgctcattaagcaaaggccctccaagtctcctttttacttcagcactttggaaactccaagacttaacttccgatctggggaggttctacgtggagcagacctatcccttcttattcctgttcctgggtgtctccataatcagcctctaccttccctggcataagtcatatctgttatgctgcaggaacgagtaaccaaagctagatatcccttggaccactgattagtgacacattttctccacaacaaagggaggttaaagacaaaggtttaaccctgagaaactttttttttggcaagataataaagaggttaaagaggctacgtggatctgtcactgctttagcttaccattttcaattcagcaccaaagtgctcagaaagacaggctcagtcaggacgacttcttaaagggatacacaggcaatattactggcaaaatgattttccaaagctgagccacgcgccccaccctacagggaggggagtagaatcttatggcccagcattggcattgaggcatcttgctttttttcctcagaattccacaaaggcttaagagtgatctaaatgcctggctggaagctcaagtctaggagagctattttactgcactgttgagatgttctctgcaaggtagtcacagataataagcaatttagtagataattattctatacaagaattaatgttctctgaaacagtgattaatagaatcttcacatctggcctggctgggaggcttgggggcaggaaagggagggtggaaggatgggtagcacatcaaaatggtgatgaactggcaaaacgacaatgctgctgtttttgtatcctttaaagcctatatcccagggttttaaacgacgccgggggtgtgcttcacatctggcctggctgggaagcttgggggcaggaaagggaaggtggaaggatgggtagcacatcaaaatggtgatgaacctggcaaaacgacaatgctgctgttttgtatccctttaaagcctataacagtttaatgacgcttttttgtgtgcttcctgataggaagtcaaataagttttagtattaagaactggggatataaccaaaggaaacctagagtcaactgactgctggaggaacagaagcaatgctttctttccacccttcttagatagtaatcttacttttgttggctaaaagcactttcttcagcattctgagttaacacgggttccctataagctcccctccccaggtggacagtctattttctaagacaagctcaaagctcaaactcaccaaattaccactataaacaaagcttcagggaagagacataacctacttcaaaagcttcaggtcagagacgccaaaatcatgtgactgctagctcatcaagagtgtgcccaaatcattcacaaaatgggattccctttccttttcttttttttttttttggagacggagtcttgctctgtcgcctaggctgcagtgcagtcggcgggatctcggctcactgcaacatccacctcctgggttcaagcgattctcctgcctcagcctcccgagtagctgggactacaggagcgtgccactacacctggctaatttttgtatttttagtagagatgggggttttcaccatattagtcaggctggtcttgaactcctgaccttgtgatccacccgtcctcggcctccccaaagtgctgggattacagggcntgagccaccatgaccagcccttccatttattaatttataaggggactagaaggacaaactatttgattaatttgaaggtgagaaggtatcattttctcagatgctccaactaggcttcttcacatccctcaaaggttatcagctaaagacaagagtttctgaggctttatgcaaaaacatggtcaaaatgtgaaaccgcccttttagaggcagggttttgtgaaaggcttgctggcctccaaaggagagtatgcctaaactctctgggctcccaggacctgtggtgacctcaagctaacctgatgcacagacaacagtatcttttagggactgcagccaatgttcccccaatttacttttttttttataccttaaaatatcaaatgtttcatttttaggtgatatcccaagtgacacagaaacacagctcctccggatggtgaagtctccgctgcaaaactcacgaaacagcacagaggatgactctagggtgctctcccacttgctccaagttaggcaggtgccctgatggaggcaaggctgagccattaacatgcacagctccatatcctggaagcctctgtagccttgaggagataggctctatccaacaggactcagaataaatgactgccacctcaactgagcagtatgaactgcccacctcaactggcagtctgacctcttccacagtctttaagaaacagaagagccatttgcattatttaatcaccactcaataatctcctccctccccatagctgcttgagttaactgtcccacaagtgtcctgtgtttgtaagatgagggttattttctgaatgcagatgggataggatgaagctgtattatcaattacagagacagccaactctcatttctcttaaagcaaaaattcattccactgtgatttctccaggtatttcctgcaattctaaatccgcccttgatattagagaatattaaaatcacacagttgtggcaaaaatcacattgtggctattaaatcctttttgtgaactaaaaaaagtgaatgtggcttaggctaagctgttttttttttttttttttttaaagatgaggatgcggactccaacaaaggcattaagaaagtactagatgaaaatgagaaatatgtgaaggataacatgtgaaatgtacactcaggtctaacaaatacctattatttctctggttaagaaggtttagcaggagcctccaatgagcactgtatgtacagaaaagggaaggagcaggaggaggaacagatctgcacagaatttttttcttaaaaaccacaaagggtgacttttttcttctaaggcaagccaggcctgagaggcatttacatggggctggctcctaatatcaaaacaaaatatttctttggccacaaagggaacttggactatggtaggcaacacattttacaaaacttactggcaaaacacttcccagagggccagtggacctactctggttccccagaggcttccaagaagcaaggccttcaagtgccttcatgttcccatgggngcttgtgccagtgcaatgccagaaggcggatattcctgctgtgaacgccaccctcgagaccttctgcagcctgagagggggtgatactcccacaccctttgatccttccagatggctcagcctagatctagcagtgagagagccctctccatgcagggcagatggagtggtggacacttgtgaaaacaaaacactaactgttccatcctgttatatttgctgtgaggaaaattaagattcctgttgtatgggctgcactgtttctggaagactacaggaaaatctaacatgggttgacacttcctgggtagcccttctgtacatacacacacacacacccaggggagaaggccaggagagaaaatcctggtccaaaagatcacatgaccttactagtgtttccccaatgactgtaatttataaactaaaaatttttacaaatccactgctatcttcttctgtcctgagtttggtagactttaatggatgctccagcaataaccagaatctaggacatgcagactcactgtgagcgagaagctagggatctgccctaaacataggaacctgtttctatcaagcctgaatgaggtcagctctggtagaattaatgacaaatcaatgtcagtgaaatattctgcaaacagggtagcttttgtgcctttcttttggattattttcctttggggagataagaggtattgccaacccatgggtcctaactaatctatcactaaaggactgtgacgacattcctcagtaaagacagtcatggtgtttactgtgcccaaggagggaaaatcccagatcatcagaatccccagtgcaacagaaaacagcacccagtttcaacaattctgatgttggacaaagcctctttttgtcagttaagaaagcgtaagcacaatctctcagtcaattgcattaacaggaatccattcatgtcactgaaaaatacttcttggcacagttcactttccgtgacccaaagacaccaacaacaatcaaaactgcactttcagggtagtatattgttacactagcccagtcaaaacatactcagaacatttaaaaatgtataaattactgttagcactgcagttccgttttattgtcttatttatttattgagacagagtcttactctgttgcccaggctggagtgcagtggcatgatcttggcttactgcaacttctgcctctcaggtttaagcaattctcatgcttcagcctaccaagtagctgggattacaggagtgcaccatcatgcccagctaatttttgtattttagtagagatggggttttgccatgttggtcaggctggtctcaaactcctggcctcaagtgacccacctgccttggcctcccaaagtgctgggattacaggtgtgagccactacacccagccctgcagtccctttttaaagagtactggactgttttcctgcaaagtactttcaaatccataccataaaggtagaatttatctgggaagaatgtgttttttgaattccacctggcacttggttaaatctactttattttgccctttatttatttgaacagaactttagaatgctctaggtcaggaaaagaaacagtgtgttcgtttttaagaaggatgtgtgaatagtaagttggcattcagactcaagtcccatggtattgttcttatccaatgggacctctccttgggaatataattcctttaccagaggtatcatggtatcccaagaatataactgctcccttggctctgtgtgtgaagattgggggagaggatgtaaactaagagtata

SEQ ID NO: 677 - DNA, 1402 bp, Homo sapiens
  misc_feature (1)...(1402): n = a,t,c or g
ccantgttggaccctttggtttgggcccatatatccacctgttaatagggaaaatccccatgaagaggaaatggccctagtgcccccccaactcctcccaaatgtcctaagttaagtagttaccagcctgattttttaatgaatgccataattggaatgtggagccctctgaggttgtgatagcttgtacatgaatttcaaatgtcattcctaaagaatgaggggtgggagggatttatagttagaaacgacagtccgaggaaggggtattttcttgttgtcagggctggaatgaatcactgctgctcaagtcaaaggttcttgaatatccttagtttttgcatttcccctccttttcctttgacctttatttatttaattatgtatttatttatttatttatatacttttgctccattcagtcacaaacacaaagcaaagcagagcgcgcatatatatatatatatctgtatatgtgttgtaggcaaaacactgtgaatttcacaacaaccaccaccaagcaactattttgccatcttaacatacatctcaggagacgaaatgagaaaagatggggatgtcattttttagtctatgcgtttgaggccaggtccatgtttatttatttctttagtctatgcattaatgaaaatgatcctgagtggaggttagctgaacgttcaatgtactggagcaagcatcataaaagctgctagtagccatgtgtttgaacaggaaaaatattacagaaaatgaaatgtaaaggcctatatcttgcagcttgtatatcttactattgcttaaaaaatgtataaagcagctggaaatgttttaaatacaaggtctttgaattaaatgtggattttaaatatgtaatcccttgacaaatgaccaaattatggtgaaactaatgcctcccccgcgttcctttgaatcattaccctatgaccttaacaaatcctgccccggagatgtggacattcctgcatttgccttcctgtatcctggagagatgtttgtatatatcccaggccgtaatacacacacatttcccatatctctctacagatatatttccccttcaatcgtgaccctggtatttggaactctccttttcatttggctcatcttccgttttaatgtgatgtctctgtgctaatacttaccagttcttgttttgcaatctgttttgaggtccattgctttactaagacccactgcatcttggctgatttcaaagtgacaccgtgaatacagtgtttaaaaaaaaaaaaaagttttgtttgtaaatcatgtgaccagcttctctcaacctgacatggaaagtctcttgtactacagtgtatttaataaaaatgatgtcttacaataaataacatactccaaaaaaaaaaaaaaaaaa

SEQ ID NO: 678 - DNA, 1333 bp, Homo sapiens
aagcttggcacgagggtcttgtcagcagcccggccattggagcatatctttctgccagttacggagacagcctcgttgtgctggtggccacagtggtggctcttctggacatctgcttcatcttagtggctgttccagaatctctgcctgagaaaatgagaccggtttcctggggagctcagatttcttggaaacaagcagacccttttgcgtcgttgaagaaagttggaaaagattctactgtcttactaaatctgcatcaccgtgtgtctttcataccttcctgaagctgggacagtattcaagttttttttctctatctcagggcaggtcatagggtttgggatctgttaaaattgcagcattcatagctatggtaggaattctgtctattgtggctcagacggcctttcttagcatcttgatgagatcattaggaaataagaatactgtcctccttggcttgggcttccagatgctccagttagcctggtacggttttggatcacaggcctggatgatgtgggcagcagggaccgtggctgccatgtccagcatcacgtttccggcaatcagtgccctcgtctctcggaatgcagagtcagatcagcaaggagttgcccaggggatcataactggaataagaggactatgcaatggcctggggccagcactgtatggcttcatattctacatgttccatgtggaactgactgagttgggcccgaaattgaattctaacaacgttcccctgcagggagctgtcatcccaggcccgccgtttttatttggggcatgtatagtccttatgtcttttctggctgccttattcattcctgaatacagtaaagccagtggagttcaaaaacacagtaacagcagcagcggcagcctgaccaacaccccagaacggggcagtgatgaggacattgagccactactgcaagacagcagcatctgggagctctcttcatttgaggagcctgggaatcagtgcactgagctgtaaactcggcagaaagtgggattctgcatacgccatctctgagagccatggagggagccacacccctggtgacttcatggtgctggatgggagacgctagcggcatccttcagggccaagtttgataaataccaccgccatcattctgctcatcctcctcctgtttttttttttctcttacattcttttttttttcccggttaatccttaaaaccagaaaaaaattggaaaaacttctttgcaaaaagggggcaactcccagggggaacctcaaataaaaaaagcattcttttgtgaaaaaaggagggcttccttgaaaggacaaaa

SEQ ID NO: 679 - DNA, 1009 bp, Homo sapiens
gaaacacagattgaaacatgagaacgtctctcttccctctagagcctcacacttgctgcctcctctgcctggaactctctccctctgctctcacagggttccctaagtgtcgcttcctccaagaagccctccctgatgagttgagccactttagtttgtgctcaggctcaccctgcacgtcttggttgctctcatcactgtaatgatctaaaacacacgtctgctcatgagacccgcatcccacccccgatgctggggccgctcttggattttcatgcctgctgccagcacccagggggagctccggaaatgtctgctgggggctcggaatacccacctttctggtaatgcagcccagcgggtcccagcctcgttttccagccctcactcaaaatggagtcgctctggttcgaacgcctctgacaagtgtgtacctacgtgtcaggcccatccttcctgcaggcctttgtcttggtgtcaccctgcctgagctggccccaaccacagtagcaacagtgatgctgatgtgtgactgctgccaggagcctgctcacatgaccgtgtggagaaagttctttccctgaggaccatctggagtggacgcgtgcactacccctctctgaatacaccctccccacgaggccctctggagcatcctgtagagccagcccctacccagagaccctgagcccagagaatgcgctgggtggtgagccctggggacgaatgcagagccctaggtctcctctccagaaagaccggattttgccatgttggcccaggctggtcttgaactcctgaccctcaagtgatccacctgcctcggcctcccaaagtgcagggattgcaggtgtgagccactgcacccggcctcaggcaggtatttttaccagccgaatactcttgcactgtgcactcttcgtgttcatcatcagtcccccggatgggtgtttaaggcattttccaaagctctgttattaaaaacacggtgcaatgagtttttttcagc

SEQ ID NO: 680 - DNA, 530 bp, Homo sapiens
ttttttttttttgagtgtggttaatcctttaccaatagcttttctgttacaattcacaggagaatacataatggagagaaatcctatgagtgcagtgattgtggaaaatcctttaatgttctctcatccgttaagaaacacatgagaactcacactggaaaaaaaccctatgaatgtaattattgcgggaaatccttcacaagtaactcctacctttctgtgcatacgagaatgcataataggcaaatgtgaattcaataactgtgggaaaagcattcattgatctttcatgcctcagataacatgagcaaactctaacaagatgtatgaatcacctgctactgtgtaacaaattaccccccaaaattttgtggcttcaaacaaaaacacttgttatctcaaaatttttgtaggtcaggaattcagaaacaacatagctctatagttcttcaggatatctcaagaggttacagtccagatgtcagcagaactgtaatcatccagaattgttactggtgaagggaccactt

SEQ ID NO: 681 - DNA, 7172 bp, Homo sapiens
  misc_feature (1)...(7172): n = a,t,c or g
cgctcttccagatggcggcgcgtccgtcgcgagcgaccgggccgaggggaggccagcgaagccgagtaaaaccgccgcccgggagaagactgaaggagcagttgccgccgttggcggcggcccgagcagttttcgctgctgctacggctgttgccatgaggcgaggctagggaggacctcacttccccggggtgtaataatgttaactgaggccagtctatccatatggggatggggaagccttggcattgtcctttttctgataacctttggaccctttgtaatattttatttgacattttatatcctctgctttgtgggtgggggtttagtggttactctcctgtttggaaaaacaaactcagagaagtacctagaacagtgtgaacactcatttcttcctccaacatcacctggggttcctaagtgcttagaagaaatgaaacgggaagccaggactattaagattgatagaagattgacgggtgccaatataattgatgaacctctccagcaagttatccagttttccttgagggattatgtccagtattggtattatacactaagcgatgatgaatcttttcttcttgaaattaggcagactcttcaaaacgcactcattcagtttgctactaggtcaaaagaaatagactggcaaccttattttactacacgcattgtagatgactttggcacacacttacgagtattcagaaaggctcaacagaaaataacagagaaagatgatcaagtgaaaggtacagcagaagatcttgtagataccttctttgaagttgaagttgaaatggagaaggaggtttgccgtgatctagtgtgcacttcccccaaagatgaagaaggattcctaagggatttgtgtgaggtcttactatatttattgctacctcctggagatttccagaacaagatcatgcgatactttgtcagggaaatccttgcacgaggaattcttcttccattaataaatcaactcagtgatcctgattatattaatcagtatgtcatatggatgatccgtgattctaactgcaactatgaggcctttatgaacattattaaattgagtgacaatattggagagctagaagcagtcagagataaggcagcagaagaattacagtatcttagatctctagatacagctggtgatgatatcaacactatcaaaaatcaaataaatagcttactattcgtaaagaaggtatgtgactcaagaatacagcgattgcagtcaggcaaagaaataaatactgtgaaacttgcagcaaactttgggaaactttgcacagtccccctggacagcattcttgtagacaatgttgcactacaattttttatggattacatgcagcaaactggaggtcaagcacatctattcttttggatgacagtggaaggataccgggttaccgcccaacagcagctagaagttttattaagtcgtcagagagatggaaaacatcaaaccaaccaaaccaaaggtcttttaagagcagctgctgttggaatttatgaacagtatttatcagaaaaggcatctccaagagttactgttgatgactatttagtagcaaaattagcagatactttgaatcatgaagatccaacccctgaaatctttgatgacattcaaagaaaggtatatgaattgatgctacgagatgaaagattttatccttccttcagacagaatgcactttatgtgcgcatgttagctgagcttgacatgttaaaagatcctagtttcagaggatccgatgatggggatggagaatcttttaatgggtctcctacaggaagcataaatttgtctttagatgacctttcaaatgtttcttctgatgactcagtacaacttcatgcctacatttcagacacagtatatgctgactatgacccatatgctgtggcaggcgtttgtaatgatcatggcaagacatatgcattatatgccatcactgtacaccggcgcaacctaaacagtgaggagatgtggaaaacctatcgtcgttatagtgacttccatgacttccacatgagaatcactgaacagtttgaaagtctctcaagcatattgaaacttcctgaaaaaaagacttttaataatatggatagagattttttagaaaagagaaaaaaggatctaaatgcatatttgcagttactgttagctcctgaaatgatgaaggcatccccagctttagctcactatgtgtatgatttccttgagaacaaagcctacagtaaaggaaaaggggattttgctcgcaagatggacacttttgtaaatccacttcgcaattcaatgaggaatgtttcaaatgcagttaaatcccttcctgatagcttggcagagggaatgactaaaatgtcagacaacatgggcaaaatgtcagaaagattaggtcaagacataaagcaatcattttttaaggtgcctcctttaattcctaagactgattcagaccctgaacatcgccgagtttcggctcaacttgacgataatgtggatgacaatattccacttagggtaatgctgcttctcatggatgaagtattcgacttaaaagaaagaaatcagtggttgcgaaggaatatcaaaaacctacttcaacagcttattagagctacatatggcgatactattaatagaaaaatagttgaccatgttgactggatgacttcacctgaacaagtagccgactcagtgaaacgtttcagagatgcattttggccaaatggcattttagcagaggctgttccatgcagagataaaagtattcgaatgagaacaagagtagcaggaaaaacgaaattacttgcaattatgccaggtgagtgagcatgtatagttaaaaatctttataatttgtcattcttctgagtttttagcattcatcatgccagtgtaactgccttttgattataacaactaccttttgatggcttaatacatatcaggcactgtactaggcatttctcatatgttcttaatcagtcctcatgacagtactgtaaagctaaggactgttaacatcaccgctttatatgtgaggaaacggaagctcagagaggttaaataacctatccaaggtttatagctactaagcaacagttggtattctgacttggctttaagtgatgtgaaagcttatgcttttagccacttcgctctgctgccttgaaacatattgggagttaagttaaataaataaaatacatgacaggtgaaagggctaataaaatataaagtatgaatttttcaggaagaatatttgttgtacttaggaaaacaagttatttcaaaaactccatttacatagaaagaactgattggctgattattaatctttattacttaaaatacaatcccaaacaaagtatacttagtagcattttgttggtctgattttggttgcttcattagggtatagctatctcactaccttagatttactttttctcgtttttcttctttcaatcagagaagttatataatgtaaaaagcaatttaatgcggctgggaggtggtgatggttgttttgccccttgttaatgagtatctttgaaaatgcctgcatgtcttttctctgtattttaattctggatgtagagaatgaacagacatatttgtacattctttaatatcacacaataccaatttttttctctaattttgttttcttacctgtattttctctataaattttaatgaccagccttctcttctgtcaattaaattaaaaatttgccacaattttaattcttacctatataccgtttcatttgctgataaaaaagcaaattatagaaatgacattttagaaaaataagaaacaattgcttaggatattatttaatatactattatagtaaacctgattgtgctatatggactgactcagttatctagctggaagaaatctttattcactaaatatttattgaaagttattatgtgccaggtgctgttctttgcacttatgtttgccttcttggagcttactttccagtagaaatagagagactcaaaaacacacagaacaaataaatggaacgtagtttgttagataagtggtaagtactaaagagaaagatactgcaggaaaatggaatagatagtgtcagatgagttgcagttttagatggggtggccagggcaggcctcactgagatgatgatggtggtgtgaagatctgaaggaagtgagggtaaatatgaaagcatataaatttatatatacataatccttgcctattttttagtaaattctcaaaatttttgctttaaattatatcgtacccctagttagataaagactttttggaaattgcatgtttctttccaaagcagcaaaataatatctatattatcagtattatgaataattatttgtaattatgaataagaatatgaataattaataatcatacatgttggtctcataacttggtgttatttatgattaaacaccaaatttgctcactcttagtcacagcaccatcggttttctattttctttgctttcttcactttgaatttaaataaaattcaacccaacttgtactatccctatttcttgagcatgctttgtttttctagttactgcttatttgctcattcatgttcttttcaccaaggctaatccttcatctcattgcacctatcaaaatcctgcccaagtagaaagtctcctttacctgccacttccttaaagggaacttttctttgttatcgcatctgaaagtctccccactaccaatattcttatacttttagcatttttatggtatagttactatgccaggggtttttgtagatcagggattaatttttttttttcctgtgttccaatgaaactttattcaccatcatggattagtttgtttccttacagcatttgtcactattcattaggcctactaagaatatttgtataatattacaaagtttacagatcactttttacattatttcattaaagacttataaatccttataaggatgttattataaatcctccttttcagatgagaaaagagagtcagggtggtgggtaagtatcacatgggtattaagggacatgtttgtaatcatagtttgggatctttgagactgttttttattttttatctcttacacctgtgctatattgtctcccagtagcttttgcattaagtgcgtaaatagatgcatgcatgcaaagatgcatattaagtttcagctatagtacatagctgaaatgcattaactggttacctactgttcatcagttactctgctgtgtaccttaatttaagaacatttaagagtttaggccttgtgtttcctttgaataattatgtgtgttttcctccacttcatttagatgagctgaagcacattattggggctgagacaacacggaaaggtattcttcgtgtttttgaaatgtttcagcacaaccaattaaataggagaatggtttatgtcttcttggaaggctttttagaaaccttatttccacagtataaattccgtgaacttttcaacaaactgcattcacggtcaaagcagatgcagaaatataaacagaaacttcaaactactcaagcgccttctttgcagaaaaggtgacactccactctatgaagctggtgttcattttgtccaggactaatggtatggacagatcttctggggcttaactcaaatactgttgtgtctgcaccagtcttttagtgtctcaaaatagattattaatacatccataagtctgtggttcttctcattctcatctataatccaccactaccaagagagatttctgtgtcttaaatgatttggtgcatattttgcaacattgagagaaaactgcccccatctcaagcaagaatgggcgttggtttcttccatttcaaactaatcagcattctccaggcaatgacacaagtgcccagagtgtatattatgaaaagctaaaggaaagcacaaaacaatggttcagaagataaattggctaatttgtttaacagttggagactgtgcaatgtacggacttggaggagtttgtttggcataatgattttgtaggtctgtcagcattttggatatattgtgggattagccaggtgtatgatcctttgaaacatctctttcaggtctggagaaagagacagaatgcccttaaagtgtgaaataaccttatacctgaattacagttttgtgatataaaataaagctgagtataaaataaaaccaatcaaacacagaatttgattggatttgttattcattggtatacaacaatttttattcttatgtgtgctttaagggctgtgttttgctcttagggtactcaattttatgtttccttttggcattctttgtgcaaaaagaagcatgtggtggctctcatttaaatttccaaattattagtttttatcttaaacagattactgattatacagaagatataatttattggaagaactgccaaatacattttgtccttctaaaaatatggaaatttaaatagtagtctggaaagttaccatatgataatttttaattgtgtgatctagacatgccttaggtaactgcagaaatagcaaattaaatgattaatgagcttattagtcatagtaaacatacagattcctaattctatgacagtgtacatatatgaaaataaatgatgaaaaaagaactataatatttttaaaaatatgcttttatttatatttcacataatgtaaagttctacaaaataaagctagtaggcaagacccctcagtgtatacctttaaacccataaattaattttatatcaataaaataaaatactttctctagttttggagcttttgcatttcctatagttttctgactgtccattttatccatcttagaagtattcacatcccttctatgcaggatttctgcatagttttaaatactttcattgcctaagggtttgggtgtgtcagctttttttgttttaaaaatatttaacactaaaaccttaaaataatgaagctacttatcagaccactgaggccaagatcctggggtatttaaaaggaaagtctggggtgcttaaggattaaaggggacaggagtattgggtatccccagtttatttgggggggctttaaggntggggaacc

SEQ ID NO: 682 - DNA, 1077 bp, Homo sapiens
gtgctacatattcttcagagaattctggtgacgggctataatgtggggttgattattgacattacatggcttccaagttttaaaataacgtaagttttgtgtagtggcaaacaggttctagggctacctctagagcttactagctagtatggtttacagcaattagttttcacagcgataaagggatcagtcactaaccctcctaggaaatatcgactgtgaaagcgccagatactgaagcagtatataaatattaaattagaatattttgcatgccatatagtttcaagttgccttgaaatgaatgggttcacttttatgttcctgttcacagcgcgagtgtatctctatccacgtggggcaggcgggtgtccagatcggcaatgcctgctgggaactgtactgccttgaacatggaattcagcccgatggccaaatgccaagtgataaacccattggtggcggggacgactccttcaacacgttcttcagtgagactggagctggcaagcacgtgcccagagcagtgtttgtggacctggagcccactgtggtcggtaggtgcctgggcactggatggcagctttcctgagagggtgggagagcattggtaaagccccgtgtgggctcctttgaatcctcctgctgaaaggatgggatagacaggcatatgcccatggcattgttaggagagaaactgaaaggttcgtgatcaaagtgtctgtgagactcggctcctaatttaggaaaacctgacctacagggaaaagctgctttgccagcagtaagatgggctgtgaagagattccctcgtgcgtgcctcagccctgctcaggtggccctgcctgcagggtgcagtggcattggttccctcccgaatgctgtgcattctcttatgctggtgcacgagagtcttgccctgcatcttaggcatagaaggtaagtacagaacagtcatttgcttccttcagattcgcagcctgatgtagtttccaaggagagctacaaagaggcagcacctttcagtggccccccaggagatgacagcatcacctaaagcctgggttcccgccagcg

SEQ ID NO: 683 - DNA, 499 bp, Homo sapiens
ggccccttcgccagtgtggggaacgcggcggatgtgcagccggcgactcgggtccctgaggtctggattctttctccgctactgagacacggcggacacacacaaacacagaaccacacagccagtcccaggagcccagtaatggagagccccaaaaagaagaaccagcagctgaaagtcgggatcctacacctgggcagcagacagaagaagatcaggatacagctgagatcccagtgcgcgacatggaaggtgatctgcaagagcttgcatcagtcaaacaccggggataaatcttggatttgggttccaggcgtcaaggtgaagataatacctaaagaggaacactgtaaaatgccagaagcaggtgaagagcaaccacaagtttaaatgaagacaagctgaaatatacgcaagctggttttatattagatatttgacttaaactatctcaataaagttttgcagctttcaaaaaaaaaaaaaaaaaaagtcgacg

SEQ ID NO: 684 - DNA, 888 bp, Homo sapiens
atgagccccacaagagaagcaccttatcttacactctattgtaccctcagtgcttatggcagtgcctggcccatggtgggcctcagtaaatacctgcagaaggagaaattcctgaatgaacacagagaggactttagcaacgcattcggccttggagaagataaaggaggaaattttctaaggctctcacctccctctagcggccgccaaggacatcacacacgccgagcggaagccctgctgggcggtgctgccggctccaaccccggaaaggccacgtccgagagagctcacctactttctcctggaggggctgcgctggtaagtgaagagtctaatgctgataagcgtgtggaaaattggcctctgatgcagtctccttggcctacactaagtataagcactctttatctcctgtttgtgtggctgggtccaaaatggatgaaggaccgagaaccttttcagatgcgtctagtgctcattatctataattttgggatggttttgcttaacctctttatcttcagagagttattcatgggatcatataatgcgggatatagctatatttgccagagtgtggattattctaataatgttcatgaagtcaggattcaattccatgtgaccattgggcacacggcactgtctctttacactgactgccccttccccaaatggatgcactgggctctaattgcctatgcaatcagcttcatatttctctttcttaacttctacattcggacatacaaagagcctaagaaaccaaaagctggaaaaacagccatgaatggtatttcagcaaatggtgtgagcaaatcagaaaaacaactcatgatagaaaatggaaaaaagcagaaaaatggaaaagcaaaaggagattaa

SEQ ID NO: 685 - DNA, 600 bp, Homo sapiens
ggcacgaggcgacccaatgggagtccccgccaggagacacaaccggcggctctccggggatttataaggtcccgccagcaaccgcgcgttgggattcgtggtgttgctggagacccgtatggtgtctgcagtcagcgaccctccaacttcaactactggatcaaccatgtgtgagtgcatctccatccatgtgggccaggccggagtgcagatgggcaatgcctgctgggagctgtactgcctggagcacgacatccagcccagtggcaccatgcccagccacaaggccctggggagcagtgataactccttcaacaccttcttcagggagacccagcctggcaggcatgtgtcctgggctgtctgtggacctggagcctgctgtcatagcacaatgaagtcgctgtagagggaagggaccactgaaggtgccacctgctctccccgtctcaagcccaggcaggacctggccttagaagtgggtctctggttgggaggctgaggcaggagaatcgcttgaacccgggagacagaggctgtggtgagccaagatcgcgtgattgcactccagcctgggcaacaagagtgaaactccgtctc

SEQ ID NO: 686 - DNA, 416 bp, Homo sapiens
gagaaaaaccctatgaatgcagtgactgtgggaaatcctttattaaaaaatcacaactccatgtgcatcagcgaattcacacaggagagaatccctttatatgttcagaatgtgggaaggtcttcactcacaagacaaatctcattatacaccagaaaattcatacaggagaaagaccctatatatgtactgtgtgtggtaaggcctttactgacaggtcaaatctcattaagcaccaaaaaattcatactggagagaaaccttataaatgcagcgactgtggaaaatcattcacctggaagtctcggctcaggatacatcagaagtgtcatactggagagagacatatgaatgcagtgaatgtgggaaagcattcattcagaagtcaacattaagtatgcaccagagaattcatg

SEQ ID NO: 687 - DNA, 837 bp, Homo sapiens
ttaaaaggttaaacatacagttaccacattgaaatgggaaaagctcctttgtccccctctcaggacgtgcgatgggggtgtggctcgcttcttcagtgctccgctgctcaaacctctagaggagcagacagacgggggcaggctgtggggttccgaccccatagcactatctaggggtgaatgtttacagcttgtgaagccccagtgggtgtgttttacagtttgccgtctataggtggcttgtgttagctcaattagaccctctaccatgtcgcaaggacagagggctttctgtacccccgggtttcttgccttggtgtactggaagaataggatcacacatgggcttggagaatgagtgtgaggttttattgagtgggggtagctttcagcagatgggggagccagcagggagatggttttcccctggagttgggccactcggcagccccggctctcttccaactgccccggccaaactccgtgtcgttctgccagtgccaatgtactcctctcgatgtccagccgcttctgtctctgccttgctagggtctccgttttccaaaaggtctactacagctccaggatctactgcactttcaaataccttttcaaatctcatgctctcctgaatcataatggggaacgcagagggaaagctgttggtctccaggtactgattcatgaggtagaccccgaggtacacatcttgtttgccaggcaggaacactcctgggcaagaaatcgcccggatctgcagctccaccaccacctccagaggcatcgttccctgcgtgggcgaaaggactggaatgagaagatccttttgtgccgagc

SEQ ID NO: 688 - DNA, 2019 bp, Homo sapiens
tcagcgctgacgaggtctgccgaggacgcgtttctctctgcagcccggcaccagtctcaaggccatcggctccgacagcgtcacctcctgggaccttcccttcatgtatggtcccagcggcatgcgggcctggtggaggaggtcctggcctgccgcccagggatggccggtccaggcgcagggccgattgtccacttctggcccctcctgggtccctgtccgtcgggaagtcaggaagaagacgccgagtgaggtcacggtgcccacgagggtggattcccctcggcctgaccacgccaggaggtggccgaagggaagagggtggggcaggggctgctctgcaccctctagcagagcggcatccctgcaggtgtttgctctgacgaggagaagccccagagagcagttcgggactgtgcggattggctttagggagccagcttttaaaacgcgttggcccacggcctcctgcggcctggtcactggggacgggagcaggtatgcctggtccctgtgctgggccccacgggatgtaaagaagggccacctgggcacggcggggcctgcggtgcgggctggcctgtgggctccacagggttccatgcaggcattttgctcccataccccgatgtccaagcccggcctgctctcccctggaacgcctggaactagggtggtcaggctggggtggaggagctcccctggaatgttccagagcttcccccactcctgccgttctgagtcaccctgcctccccggaggaggaggaggatcagctgagccgccgcgctcacgtagtgtctggctgtctgcctgtctgcctcgctgtgagcagagtgggatgctgccgataaggcgcacgtgggccctgggaggagcccgaggcagccactcccgcacgtgggcaggaggagggctgctcacaccaccggccgagggaggaggactgcgggctgcgcccctgccccagccaggaccctctgcatcctttccatccttggcccatggtgtgtcctgccacatcttcccactctgtgcctgggccaggcccaggcagcgtcctgcagccagggtgctcacggctgctttgccggctgttcctgcactgcacgtctgcgtcacatccggtttttgtaagtgcccgttacaccctgtgtgcacacttgcggacgtgcacggctgcatcacatccggtttttctgtgatttctttgccacagacctgcgccccctggacatcctggcggaagtggtccctttctgactcctggcaggtggacgcctgcccagagagctgctgtgagcccccctgctgcgccaccagctgctgcgccccggccccctgcctgaccctggtctgcaccccagtgagctgtgtgtccagcccctgctgccaggcggcctgtgagcccagcccctgccagtcaggctgcaccagctcctgcacgccctcgtgctgccagcagtctagctgccagccagcttgctgcacatcctccccctgccagcaggcctgctgcgtgcctgtctgctgcaagccagtctgctgtgtgcccgtctgctgcaagcctgtctgctgcaagcccatctgctgtgtgcccgtctgctctggggcttcctcttcatgctgccagcagtctagccgccagccggcttgctgcaccacctcctgctgcagaccctcctcctccgtgtccctcctctgccgccccgtgtgcaggtccacctgctgtgtgcccatcccctcctgctgtgcccctgcctccacctgccagcccagctgctgccgcccggcctcctgcgtgtccctcctctgccgccccacgtgctcccgcctctcttccgcgtgctgcggcctctcctcaggccagaagtccagctgctgacgggcaggtcccgtttctccagagttgttccagggccatctctgacttccgaaaatccttgcagccctgagccctgtctgagtctcctctgcccatagccactgcacctccagccagcaatgctgagctttcat

SEQ ID NO: 689 - DNA, 480 bp, Homo sapiens
ccggattccgggtcgacgatttcgtgcggcttttgtgttgggcagcgcgaatgtggcgagctcggtgcgtctccgctgctccttccccttatccctgggaggtccaagtggtcccgcggcagcttctgttgctctgggacctgcaggtcccggaaggtccttagggaggaccccagacaccggagactgggaaatggattcagtgtcatttgaagatgtggctgtggcctttactcaggaggagtgggctttgctggatccttctcaaaagaatctctacagagatgtgatgcaagaaatcttcaggaacctggcttctgtaggaaacaaatcagaagaccagaatatccaagatgacttcaaaaatcctgggagaaatctaagcagtcatgtggtagagagactgtttgaaattaaagaaggcagtcaatatggagaaaccttcagccaggattcaaatttgaatctgaataagatagt

SEQ ID NO: 690 - DNA, 1968 bp, Homo sapiens
ccttgcttgcaggaagccatgcagttagtttctgcagttagtcgtgtgaggctaggtggttgggcaggcctcgggctgtaggtgttgggtgggaaaaagacccaagggcctgaaagggagggaaaggggagggtagcgggagggtagcaggtgagttcctagggctggaaggtttaacagcagcctggtgcagtgccctgtcatcaagacaaacccacggtcctcctgggtgcctaccaagcttggtttgtacaaaagcaaggtgggagtctatttttgtacatgagatacatcacacttacctgtgggccagtattgtgaagtgagtctgagttgtttacactgatgccttccctgcccaccacaaattgtgtacatagtcttcagatgataccacccctttccccagctcccaaccaagagctggttctaggcctgtgttatatgtcatatttagcgtttttatatatgacctttgatttctgttgtttgtattttagcacagtgtatgcaccttcatttaaatacatctgtgtgcatacagatacgcatatatgtgtgtgcgtatgcatatatctctcatctgtagtttccaagagttcagctgaagcagatggagtcctgcagcccaggagacaccctgcatccctgctaatagtgtttgccacaagtattagtgagtcttccttattaatattttcatttcagaagactgaagcaaagctgatagtgtttgctgtttctttggcagctaagtgagggtcttgggatgacttgctgtgttcctcaagctgcactttggggccatctctgcagtattagccccctttttgcttggtggtactctgtctgtgcctgtgtgtgtgtgtgatagtcactcttgcatggcttccatgtctggtttgtggcatttggggataaggtgctgaagccagagcatttgcagtttgtttgaggcctcgttgccaatgatagatcactcctgttgacctggtatgtctgcttgcttgctgcttttccttgctttctcttggaagaggaaaggactctggtcaggcccaggctgagtgagatgagctgcagctggctcatggccttcttagagcagagagaggagtatgtcattttactaagttcctaaacaaacatttatgcaggcaacactccttgcagatccagaaactgaggcacaatagggttatgacttgctcaagaatatgtagctgctagggggtaaatcaaggcatcacaatttctgttcagcgggcaggaataggctgtgaattgctagcactttttttttttaagcaattactttttgacttgttcctctgaaagggcaagaggcgtacacctttcccaaatgtaaactaaaatctgcaggatgccacccactgtatagttctgctttcccagagaggaagaacttttagaaaccaaatgatcttaattgttattgcccacccctggcttttccgggtagaaaattcacagtaggaatgattgttaagagagagtgcttggaaccatgggttaacaggaaaggctacctaacttcacatatctgcaaccagagcagccaccaagcattacttagcagcaggaaaatgattgtatttgagttcctgtgtgtccaaaactgaggcaccatgttctttgaaaacatgccacctcaaggctgggcgcggtggctcacacctgtaatcccagcactttgggaggccgaggcgggcggatcaccggaggtcgggagtttgagaccagcctgaccaacatggagaaaccccatctctactaaaaatacaaaattagccgggcgtggtggcatgcgcctataatctcagctacttgggaggctgaggcaggagaattgcttgaacccaggaggcggaggttgcggtgagttgagatcgtgccattgcactccggcctgggcaacaacagcaaaactccgtctcaaaaaaaaaa

SEQ ID NO: 691 - DNA, 2078 bp, Homo sapiens
tgccataaggttttcgatgtgggtaatatttaacaggaatagtcttaagagaacttcctgagatactcaaaagttcaagaagatctattctagctggagtggaaattccagaagtattgagcagtacataggtaggtattccttgcactggtctgctgactgtttttttgaagtccagggtgggctttcgagaaaagccagctcggaaatcaatagtactgaggccagtaatgcgaacagagtgccttccactgcttgaggtcttcactgtccacattccagcctctggctctttcacattcactactttggcagagttatggatatttaatagctcatgcaggccaaatcccttttttatcagcttccctcaaggattgcgatttaaaaataaactttattaaagcagttaaacttagcattaaataacactctttaaatggtacacctatgaagcaagagttaaatataaacccagtctaatcctgtacacttgtgattaattgtgacaatcttaagttgctcacttctttcccatttaccaattcagagaaagcccgtttcctgttttctcctcaccactttgccttggcatcacaccaaccctgcctcgggcttcagctgcagatcctccccagcccctcctcccagctgggctgactccagtcccagccccagtctccaccaactgagcagcgtacgcagggttgtgtctggcttccagcatctaccaccccttcagagcaacttccaacatgggacaggagaggaagctcgcattgcttggtctgaacagatttaaggaggttttatcacaaggacctgaaaacttcctaagcatgctttctccttgcacagctgaggaggggcaatggtgggagcggggcaggggggtggcaggggcggcaggggctctcaactaagggctctgaatcacagaggggacagatgctgccttagtccttcttgcctcccagggccaggcttcttgtgaggagcttccctgggctggagggggtcagtgtggagactgtgggggattccagcttcactctgtctaagagggtcttcttaagggcagctggggagatcttttcttggtcggccatggactgtagctctcgtgttcggatacaggaggcctcaactgcattgatgagcagagagcggaagcccccactctctagaaagtgcagggcgtggatggtggctcccccaggggagcagacattgtccttaagctggcatggatgctgctccgagtccagcagcatcttggcagctcccagcaaagcctgggccccgagttggattgccaggcgccgtggcaaacccatcttcaccccaccatcagccaatgcgtccagagccatgaatgcataggcaggcccgctgccactgagccccgtgacggcatcgatgaggtcctcttccacctcagtgcagaagcccacgctgctcatgagctgctccaggagctgcccatcctccaccagggcatgggtgcccgtggcgtacactgtagcgccttcctgcactaccacaggtgtgttggtcatgcagcgaatcactttgggggctggctggaatgccatcagcttcttctccacagagctgatggtgacaccagccgcacaggagaccacgatgtgtctggcttgcacgtcggccccaatctcatccaggatgaaggggatgatatgtggcttcacagccagaaacaggacgtcgctgtgcttcaccgtctccttgttgctgcgtgtcaggttcacacccatcttcctgagcgcggacaccgtgggcaggttcatttctggggagctggctattatcttgtgagccgacaggatgcctgcggccgtgaagccccgcgccagagcataggccagctggccggccccgatgaagcccacgctcatggtccgcggttcacgcctcctgggagccgcacgaaccccctcagcgagggaccggaagtaacgctaggggaagggcggacagcgcaggggcgaacgggcggcgtgccgaggaccggcgagctaacagcagcttctgggatggtgcaaccctattctcgg

SEQ ID NO: 692 - DNA, 397 bp, Homo sapiens
  misc_feature (1)...(397): n = a,t,c or g
ggacctatgttctgacagcgagaaggcgcgaggagagtcgttttctcagctgcacagccggggcctgacggtcgccggcggtggtgacagctttgctcttgtcttcgcccggatcgtccaccgctcccggcccgctccgcccagagtccgatggcggcggcactgagggccccgacccaggtttttgtagcctttgaggatgtggccatttacttctcccaggaggagtgggagctccttgatgagatgcagaggctcctgtaccgcgatgtgatgctggagaactttgcagttatggcatccctaggtattattgagtgttttcaagaatgaaaagannnnnnnnnnnnnnnnnnnnnnnnnnnnnnnnnnnnnnnnnnnnnnnnnnnnnnnnnnn

SEQ ID NO: 693 - DNA, 428 bp, Homo sapiens
aatacaggctctgacttaagatctttccatactggtcacatttataagatttttctcctaggtgagtgctgggatgggcacgaggatctgtatcatctgcaaaggccaccccacagttattacatgtgaaaggctgtggtaaaacatggaccacatgatgttgttcaactgttgatttcatacccaagtttttcccacagttggggtgtctaccagggtcctctcctttacattcttgggactcatgatgatcacatgaggtccaattgaggctctcatcatgccgagcacgtctgtacaatttctctttcacgtaaattcccttatatctttcctgagatttctggggctcggtcattatgttggctttcctccaagattctggagtaagaacctgtgtcaggctttgccatgctgcgatatcttgg

SEQ ID NO: 694 - DNA, 682 bp, Homo sapiens
  misc_feature (1)...(682): n = a,t,c or g
cccatcggaacactattcagtgtggcggaattcctcgtggaacatcagagaagccacactggagagaagccctatgaatgcaatgactgtggcaaagttttcagccaaagcacacacctcatccagcaccagagaatccacacaggagagaagccctacaagtgcagcgagtgtgggaaggccttccacaacagttccagactcatccaccaccagaggctgcaccacggagagaaaccctacagatgcagcgattgcaagaaagccttcagccagagcacgtacttgattcagcaccggaggatccacaccggggagaagccctacaagtgcagcgagtgtgggaaggccttccggcacagttccaacatgtgtcagcatcagcggattcacctccgggaggacttctccatgtaacagtggcgcggtgtccgagggcagagtccagctgagcacttcctgcatgcgcccccggcacctgactctgccctttatgtattatccacacgatgttttcacagagtgaaaggacgtttctcattaaacaaacctcttttcttaaatcaaaagcagtgcatgttcattntagagaaattgagacaganaagtgggcaaaaaagaagcttctgtgatctctcccacttagaaaaaaaattcattgctgctgatttacgaatatttt

SEQ ID NO: 695 - DNA, 562 bp, Homo sapiens
ccagtagctgccaggctgtctgctgtgaccccagcccttgtgagccaacttgctcagagtctagcatctgccagccagctacgtgtgtggctctggtctgtgagccagtttgcctccgccctgtctgctgtgttcagagctcgtgcgagccaccttctgtccccagcacttgccaagagccttcttgttgtgtctccagtatctgccaacccatctgctctgagcccagcccctgctcaccagctgtctgtgtgtccagtccatgccaacctacttgctatgtagtcaagcgctgtcgttctgtctgccctgagccagtttcctgcccatctacctcctgccgacctctttcctgcagtccagggtcttctgcatctgccatcccgaccaacttgtcctaggactttctacatacccagttccagcaaacggccttgcagtgctacgatttcctaccgcccggtctcccgtccgatctgccgcccaatctgctctggactcctcacctataggcagccatacatgacatccatctcctaccgtcctgcctgctatcgcccat

SEQ ID NO: 696 - DNA, 1028 bp, Homo sapiens
ttttttttttctgagccaatacatttctgtttattataacttaccccgtctcagggatcttgctagagcagcaaaaacagactcagacagaccctcacccccaggagcctgctcccaaccggggcccaaaagaaaacaagccagcgagggcactgcggaatgcagggttttggcgacagagctacaggagtgtgccttggcccccacaagggccacagtcctgcccccacctggtctcccggggctcagacagcagccgccagcccacggaggtagtcccccgccaggggcagcacggcccagtcatcggtccgcagggccacaggcactccatctgccagggccgcctccagccgcagcagcagctttgagtccgggggcaggtggattgctacacagtagctggtaggaggctgggccaccaccacaaaaggctccaggtggcgggacaccaagccctccaggccctgtggcccaagtggacaccacacacgactctcagcaccctctggcaggcaggaatcccagagctcctcaaagaagcccagcccggccccctctggaggctgcgggaaaggcagaaagaggtcggcaaagttcacgaacaggggtggcaagtgggcatggcacgtgagaccagtggatgtggtgtaaagggcatggacatccagccgtgcgggggccgggcatcggggctgcagaggcaggagcagagggcgggcagggcggccaggacacaggcagggcacatggacagcctccaggggtgcatacagctgtccttccacacggaagcgcagctccagagagtagatgggctccagcgcctccggctggagcttcaacactgggagtgggcccttgacccgatgggaccccaggctcagccgtaccagggccggtgcctcctgcaccatcagtgctgccacaaagccctggttctcggccaccagtgaagaggccagtgcaggtgcggcaagcgaggggcccagggccacccccaacttgggtgctgccaggtgtgccag

SEQ ID NO: 697 - DNA, 1074 bp, Homo sapiens
atggttcaggtgattcgcaaagatgcccccacccccaggacgagggaaccctcgctatcagataagggcatttgtcccaaaccccaagaagccttgaagttcttctgcgaggtagacgaagaggccatctgtgtggtgtgccgagaattcaggagccacaaacagcacagcgtggtgccattggaggaggtggtgcaggagtacaaggagctcttggagtccaggctgagggtcttgaagaaggaactggaggactgtgaggtgttccggtccacggaaaagaaggagagcaaggagctgctgcgaattttgctcaccaatgcgcatccgcacaacctggcggtaaaacttgagcataccggtctggacgcacaccttgatttattactttccacccacacatttggttatccgaaagaggatcagcggttatggcatgcggtggccgaagctacgggtctgaaagctgaaagaacgctgtttattgatgacagcgaagcgattctcgatgctgccgcgcaatttggagacgccatgaaagagaaacctgctgttgaggttcgactggataaatggctatgggctgcccgtttttataaaacccgcgcgctggcccgtgaaatgattgaaggcggtaaggtgcattacaacgggcagcgcagcaagccgagcaaaatcgtcgagctgaatgccacgctcactctgcgccagggaaatgacgaacgcacggtgattgtaaaggcgattactgaacagcgtcgccctgccagtacagataggaatagaaagccacagtacttggagataatagacatttgggacctcagcacaagcagtgtcaaaatagatgtattggtagacagaaatgccagattgatctcagtactgttgaaattcggtgtgcacacagtagaaatccaggcccagtctacgggcatcatcttccagagtcgtcacccgttcatgcaccctgtgacctcgccaggcacatgtcgcccaagcttaaattgtcttacaggatctccgggtaccgagctagagtgtatcaactctagagtgatcaccgggtactga

SEQ ID NO: 698 - DNA, 432 bp, Homo sapiens
gtcctgtcgtgctcacctgcgccggtcgctggaccgcggggcgctaaccctggagagcccaggagcgggcgggacatggactgcgtgatctttgaggaagtggctgtgaacttcaccccagaagagtgggcattgctggatcatgctcagaggagcctctacagagatgtgatgctggagacctgcaggaaccttgcctccttggattgttacatttatgttagaaccagtggatcaagttctcagagggacgtttttgggaatggaatatccaatgatgaagaaattgtaaagttcacaggaagtgattcctggtctatttttggagaaaattggagatttgataacactggagatcagcaccaaatcccacagaggcatctgagaagtcagctggggagactctgtgaaagtatgaaggtcatcatgcga

SEQ ID NO: 699 - DNA, 703 bp, Homo sapiens
cctgcccccttggctgagggggccttcttggctgaggctagcctcttgaagctgtcccctgcaacacctacttctgagggtccaaaggtggtgagcgtacagttgggtgatggtacaaggctgaaaggcactgtgctgcctgtggccaccatccagaacgccagtactgccatgctgatggcagccagtgtggctcgcaaggctgtggtgctgcctggggggactgccaccagccctaagatgattgctaagaacgtgctaggcctggtgccccaagccctgcctaaggctgacgggcgggcagggctggggactgggggacagaaggtgaatggtgcctcggtggtgatggtgcaaccttcaaagacagctactgggccaagtacagggggcggcacagtgatatcacggacccagtccagcctggtggaggccttcaacaagatcctcaacagcaagaacctgctccctgcctataggccaaacctgagcccaccagctgaggctgggctggccctgcctcccaccggctaccgctgcctggagtgtggggatgccttctcattggagaagagcctggcacggcactatgaccgtcggagcatgcgcatcgaggtcacctgcaaccactgcgcccgccgcctggtcttcttcaacaagtgcagcctgctcctgcatgcacgtgaacacaaggacaaggggc

SEQ ID NO: 700 - DNA, 1392 bp, Homo sapiens
  misc_feature (1)...(1392): n = a,t,c or g
ttttttttttttnnacaatagtccatatatttattcttaagcaagttatcaataaaaaatttgatactaaaatgcctttacatagagtctgctgttcataaaacctttgtgtgtttttttgtccattttgtttttagtgtttacattgaaaaaaaatccaaccatccccttagtttacacatttacaggaatcgtgccttcgtcacgttaaccacggtgagaggggaggggccgcaccattcgcacgcacacagaaaaaaaaaggaaaaaaccagggacaaagcggaacccagcagaagcgggacgaggacgaggcggcggagcagaggatccaacctccgtggctgcaccctcctcggccctctctggaactccagtggctcagcatgcccccgtgcatttttcttcacttgacatcgttctgatccccgagcctcaagcaggacctcgtccaaccacctccccagacatccaccgggaatgaaatattgcactcatgcgagacaaagggtaggctcgggggtgggagcggggggctgaaggcggggaccnccgaccacaacataagcccccagccttgagcctcctggggagcctctgggaacggcccttcagggggtccagccagcaggtgagaaacaggccccaatgggcccgagaaaaatagggggccaaggggacctgggattggggtgcagggcacccaccagcaccctgcttcgaggcctgtggtgtgggggacacagagctcgtcctagagcagtggctaacttggggggctttcctgaagctcccgtggggccaggggaaccttagtgtgggaggatataaggagtgtgtggccccccatgcgtttctgaggctgaaggctgttgggctcaggtccaggcagcctgtctgtccttggctgtgggagaaggggaggggtgtgaattccctggggatactggggcagagccctcgaggggtgctgcttgcacctggggccaggatttgggctcaggtggtcagggggaccctcattctatgccccaagcactagcccatcaggccatctgccccaccaagtggcacagaaaaggccgagaaacctccaaaggggttggggcaggcagaggggtccgagggccaggcagatttggctggtggaaaagggggcccagaaaggggccttccccaagggcagggcctgcgttttattttcttctcccctggccacagcactgctggcctggcctcaccaccatctacgcagcaggccaggggtttgggggcaccaataaggtgggtgggaaaaggggtgtcttttgcatgcattctgcttgggggtgaggagagaatctggtgggactgtgaacctgccctcataggccccgagccctgcccagttca

SEQ ID NO: 701 - DNA, 464 bp, Homo sapiens
aaaacagctttagctgttctttatcttgtgcacatgatacaaaatatgttcccgtacaatatggggctgtcacttcttgccaacccagcaccctcttcctcttctaacctgctttctgaggcttctgctcttcacctcctgctcgctgatggaaacctccagggcaaagctgaaggtttcttggggaagccaggaaagccagtatttcctatgtgtcagatctgcttggcttccaagaagggatgcatgggctttttggccagtgtttccaggaggctctgggcttcctgcttcttccccgcttcccccagagttcacagatgttgaagtttctgaaggttgacgtcactggaagtctgaccacaaacaagttggctgttactgtatttgaaacccagtacctttggcagctcacctctaaccagtaaaataagaggattccatggtttcaaaaaaaaaaaaaa

SEQ ID NO: 702 - DNA, 461 bp, Homo sapiens; identical to SEQ ID NO: 666

SEQ ID NO: 703 - DNA, 1250 bp, Homo sapiens
  misc_feature (1)...(1250): n = a,t,c or g
cgaagcacggaatgtgtctcctgctgggggccacgggcgtcgggaagacgctgctggtgaaacggctgcaggaggtgagctcccgggatgggaaaggcgacctgggggagccgcccccgacacggcccacggtgggcaccaatcttactgacatcgtggcacagagaaagatcaccatccgggagcttggggggtgcatgggccccatctggtccagttactatggaaactgccgttctctcctggcctgtgccgcggataccagtatggagaactgatggccacatgaggacagagacgagtgacaccaggtcgtcttcataaaactcgattccctctgcttctgcttgttcccaaagctttgtttaaagctacnnnnnnnnnnnnnnnnnnnnnnnnnnnnnnnnnnnnnnnnnnnnnnnnnnnnnnnnntgtgatggacgcctctgaccccacccagctctctgcatcctgtgtgcagctcttaggtctcctttctgcagaacaacttgcagaagcatcggtgctgatactcttcaataaaatcgacctaccctgttacatgtccacggaggagatgaagtcattaatcaggcttccagacatcattgcttgtgccaagcagaacatcaccacggcagaaatcagcgcccgtgaaggcactggcttagcaggggtgctggcctggctccaggccacccacagagccaacgattgactgcacggcagaggcgcagctggcctgagctggggagaggtggcagagggcagtatggctttgctgccaatagtttcttctcacaggggcagaataacccaaagtaaccctacatgatggggctctgtgctgagatgcaatgatgtgtaaactgaggcatgtggagatggaagttgacatctggcctctgaaaaaagtgtccccaggggctaggcatggtggctcacacctgtaatcccagcactttgagaggcgcgaggcgggtgtatcacctgaggtcgggagttcgagactagccctgaccaaacatggagaaaccctgtctctactaaaaatacaaaattagctgggtgtgctggtgcatgcctgtaatcccagctacttgggaggctgagacaggagaatcccttgaacctgggaggtggaggttgcagtgagtcgagatcatgccattgcactgcacctgggcaacaagagtgaaactccgtcttaaaaaatataagaaataaaaaaataaaaacctgaaaaaaaa

SEQ ID NO: 704 - DNA, 424 bp, Homo sapiens
  misc_feature (1)...(424): n = a,t,c or g
cccacgcgtccggcttgtctgaggcctctcattcaaaaaagactgttaaaaaggtggtggtagtggaacaaaatggttcttttcaagtaaagattcccaaaaattttgtttgtgaacactgctttggagcctttcggagcagttaccacctaaagaggcacatccttattcacactggtgagaagccatttgaatgcgatatatgtgatatgcgtttcatccagaagtaccacctggaacgccacaagcgtgtgcacagtggtgaaaagccttaccagtgtgaacggtgtcatcaggtaaggctcatccctgctacaataccccacacacacttttccttccccaagaatcagggccaccctccactcctgcctgacaaaagagccaccagcgttactcgccataatagttaacacatcggggn

SEQ ID NO: 705 - DNA, 1065 bp, Homo sapiens
agacgggctcaagacaggggtgggctgcacacatggaccctcctttggacacaggtgttgggggtgagcttggtgggtaaaggcagatgcatcacgatgttcctgctctgcagcttagcggtgccaaggggccctcccatgtacacaggacacgagtacacagtcaggtcggctggggctggcaggtcactggtgcccggggcctgtgtgctgatgctgacgggaggcagagggctgggttggctggaaggactgtcctgcaaggctccagctattgggtcccactccgcatgtaggacctgtagcccgatcagcagcagccctctctctggaaccgtgggatttggaccattctccaccctgaagtgcagagggttgctgttcatctccagacgtttatactggagctgactggagaccgagcctcggctaccagggaaattcgagctgggcacattctggtccagggcagcttccccacgcaatgccagcagcaggcggcgcgggtggcgaaaggctgacaggtggaagacgcgctctggtacatcactgctcgcgtccgcgcccacgcccaagtaacgaaccaacagttgcccacggcgcgacaactgtcgcagccagtgccagggcggctgcggaccggccggcgcatgaggtcgccaaggcaagggtaggcggccagtccatgagagcgtgggccaccgcagcacagcggcgggaggggcacgggggtgcgcccttcagctgctgcaacaggcaatcaaggtcgcgttgtagcgtgcccaccaactggctcagttctagagcctcggtctctaagacgccctccagaggccgccgtgcatttggccccagcactgaccacggggcgtcggactcgtcttggcgaatcacgtgggtcagcagatcctgcagtgactccagcctccggttgacttgcactaggcgttgccgcagtcgcctttccgcaagctgggcgcctcttcgagactcaggaacccacacgggtgaactccgctgcagcgcactcaagagagcgcgactctggcgtcgcaacagccaggg

SEQ ID NO: 706 - DNA, 473 bp, Homo sapiens
cacctgcaccggctgcgaggagcagggagctcctcaaagagctcaggaacggacaggacatggacacagtggtctttgaagacgtggttgtggatttcacgctggaggagtgggccttgctgaatcctgctcagagaaaactctacagagatgtcatgctggagaccttcaagcacctggcctcagtagataatgaggctcagcttaaagccagtgggtctatttctcagcaggatacttctggagaaaaattatccctcaaacagaaaatagaaaagttcacaagaaagaatatatgggcctcccttttaggaaaaaattgggaagaacatagcgttaaagacaagcacaacaccaaggagagacatttgagcagaaatccaagggtggagagaccatgtaaaagcagtaaaggtaataaacgtggaagaaccttcagaaagactcgaaattgtaatcgtcatctgcgcagg

SEQ ID NO: 707 - protein, 382 aa, Homo sapiens
  misc_feature (1)...(382): Xaa = any amino acid or symbol as shown in the table 8 as set forth in Example 2
LGLEHISSSGEKYYYNCRTEVSQWGKTPKSGLERGQRQKEANKMAVNSFPKDRDYRREVMQATATSGFASGKSTSGDKPVSHSCTTPSTSSASGLNPTSAPPTSASAGPCFSVFHSSPIPTLTSGPKSSXTIAVLLWKPRCSLIILMWTXSIINEVLTGDVTQASLQTIIHKCLTAGPSVFKITSLISQAAQLSTQAQASNQSPMSLTSDASSPRIICFSKEXGTPQTXPVPIQTFGFSTPPVSSQPKVSTPVVKQGPVSQSATQQPVTADKQQGHEPVSPRSLQRSSSQRSPSPGPNHTSNSSNASNATVVPQNSSARSTCSLTPVTSSTLQXKSTTTIVEQKFHNGEKPQRVAWKEDRDKKKQTRWQSTASQKIGITEER

SEQ ID NO: 708 - protein, 344 aa, Homo sapiens
  misc_feature (1)...(344): Xaa = any amino acid or symbol as shown in the table 8 as set forth in Example 2
CWGRWGRGTPTPSPSPRDAEEKAGGGWGRDQAPTPRRGDEGSMGAKESRIGFLSYEEALRRVTDVELKRLKDAFKRTCGLSYYMGQHCFIREVLGDGVPPKVAEVIYCSFGGTSKGLHFNNLIVGLVLLTRGKDEEKAKYIFSLFSSESGNYVIREEMERMLHVVDGKVPDTLRKCFSEGEKVNYEKFRNWLFLNKDAFTFSRWLLSGGVYVTLTDDSDTPTFYQTLAGVTHLEESDIIDLEKRYWLLKAQSRTGRFDLETFGPLVSPPIRPSLSEGLFNAFDENRDNHIDFKEISCGLSACCRGPLAERQKFCFKVFDVDRGXVLSRVELRDNMGALLEVWKD

SEQ ID NO: 709 - protein, 771 aa, Homo sapiens
  misc_feature (1)...(771): Xaa = any amino acid or symbol as shown in the table 8 as set forth in Example 2
NKHFSFQTPKKSHQKSLSFSKTTPRRISHTPQTPLYTPERLQKSPAKMTPTKQAAFKESLKDSSSPGHDSPLDSKITPQKRHTQAGEGTSLETKTPRTPKRQGTQPPGFLPNCTWPHSVNSSPESPSCPAPPTSSTAQPRRECLTPIRDPLRTPPRAAAFMGTPQNQTHQQPHVLRAARAEEPAQKLKDKAIKTPKRPGNSTVTSSPPVTPKKLFTSPLCDVSKKSPFRKSKIECPSPGELDQKEPQMSPSVAASLSCPVPSTPPELSQRATLDTVPPPPPSKVGKRCRKTSDPMKEASSECQLDASATPGVGTADSPAAPTDSRDDQKGLSLSPQSPPERRGYPGPGLRSDWHASSPLLITSDTEHVTLLSEAEHHGIGDLKSNVLSVEEGEGLRTADAEKSSLSHPGIPPSPPSCGPGSPLMPSRDVHCTTDGRQCQASAQLDNLPASAWHSTDSASPQTYEVELEMQASGLPKLRIKKIDPSSSLEAEPLSKEESSLGEESFLPALSMPRASRSLSKPEPTYVSPPCPRLSHSTPGKTGGKPTSARPVPPPTSPSSTPSPFQTDGVPWTPSPKHSGKTTPDIIKTGPGGRGRWAVAPAPLPGGARSVQPSWEPVTAXVRGQGPRPXTQHPQDAHLGGFXARGSVPAPRPVASQEPACLRPRKPLPGDSLGXVPGRESCWPRKKLTVEPKGSVTXEKIQKLVRVKRGLQVGVHGSYPPRETKRCLFPAPPHLPAVPCGAPSPASALQALTQSPLLFQGKTPSSQSKDPR

SEQ ID NO: 710 - protein, 502 aa, Homo sapiens
EIELPCSEDLNLETLSQAHVYIIAGACLSLGFRFAGSENLSAFNCLHKFAKDFMTYLSAPNASVTGPHNLETCLSVVLLSLAMVMAGSGNLKVLQLCRFLHMKTGGEMNYGFHLAHHMALGLLFLGGGRYSLSTSNSSIAALLCALYPHFPAHSTDNRYHLQALRHLYVLAAEPRLLVPVDVDTNTPCYALLEVTYKGTQWYEQTKEELMAPTLLPELHLLKQIKVKGPRYWELLIDLSKGTQHLKSILSKDGVLYVKLRAGQLSYKEDPMGWQSLLAQTVANRNSEARAFKPETISAFTSDPALLSFAEYFCKPTVNMGQKQEILDLFSSVLYECVTQETPEMLPAYIAMDQAIRRLGRREMSETSELWQIKLVLEFFSSRSHQERLQNHPKRGLFMNSEFLPVVKCTIDNTLDQWLQVGGDMCVHAYLSGQPLEESQLSMLACFLVYHSVPAPQHLPPIGLEGSTSFAELLFKFKQLKMPVRALLRLAPLLLGNPQPMVM

SEQ ID NO: 711 - protein, 137 aa, Homo sapiens
  misc_feature (1)...(137): Xaa = any amino acid or symbol as shown in the table 8 as set forth in Example 2
TPPVPTAKKQPAFPASYIPPSPPTPPVPVPPPTLPKQQSFCAKPPPSPLSPVPSVVKQIASQFPPPPTPPAMESQPLKPVPANVAPQSPPAVKAKPKWQPSSIPVPSPDFPPPPPESSKVFPPXPPXPVPAXPXXPP

SEQ ID NO: 712 - protein, 546 aa, Homo sapiens
MDYIRTDLTTAAPSPPRRLGPPPPGEQPPSGSGHVRPPGARPPHRGGGRGGGGGDPAAPPARGGGGGGKARPPGGGAAPCEPGCQCRAPMVSVSSERHPLYNRVKTGQIANCALPCHNPFFSQDERAFTVFWIGLWSVLCFVSTFATVSTFLIDMERFKYPERPIIFLSACYLFVSVGYLVRLVAGHEKVACSGGAPGAGGAGGAGGAAAGAGAAGAGAGGPGGRGEYEELGAVEQHVRYETTGPALCTVVFLLVYFFGMASSIWWVILSLTWFLAAGMKWGNEAIAGYSQYFHLAAWLVPSVKSIAVLALSSVDGDPVAGICYVGNQSLDNLRGFVLAPLVIYLFIGTMFLLAGFVSLFRIRSVIKQQDGPTKTHKLEKLMIRLGLFTVLYTVPAAVVVACLFYEQHNRPRWEATHNCPCLRDLQPDQARRPDYAVFMLKYFMCLVVGITSGVWVWSGKTLESWRSLCTRCCWASKGAAVGGGAGATAAGGGGGPGGGGGGGPGGGGGPGGGGGSLYSDVSTGLTWRSGTASSVSYPKQMPLSQV

SEQ ID NO: 713 - protein, 194 aa, Homo sapiens
GTIITPDEYTGKIMMLCEARRAVQKNMIFIDQNRVMLKYLFPLNEIVVDFYDSLKSLSSGYASFDYEDAGYQTAELVKMDILLNGNTVEELVTVVHKDKAHSIGKAICERLKDSLPRQLFEIAIQAAIGSKIIARETVKAYRKNVLAKCYGGDITRKMKLLKRQAEGKKKLRKIGNVEVPKDAFIKVLKTQSSK

SEQ ID NO: 714 - protein, 146 aa, Homo sapiens
  misc_feature (1)...(146): Xaa = any amino acid or symbol as shown in the table 8 as set forth in Example 2
AATSLPFRASTIASANSILRVGVMTSIHHFVFSKRVCCNFTSKTYFMSQQSSRTCTDGGYQALPFSCSSVSPSQQQTQIKSVRPDYLLVEPPHHMGPSFFASSGLHYDQXPHHRLHLYWVFSARPWNGDLNPSSAHDIXHEXPLHF

SEQ ID NO: 715 - protein, 883 aa, Homo sapiens
MKILTKLGYSLITTAEWEIMHDKEKLCCPSSRRWPPPHPPPPWRIAVRCPWQVIAIGNKQFQCLEALFQPSFLGMECCSIHKTTFNSIMKCDVDICKDLYANTMQKEITALVPSTTKIKIIVPRPKHRYSVWIGSSILASLSTFQQMWISKQESTLEDPPMGLTDIPEMKARGNKDTRGLTAAKKPELSENQDNGHKRDQQSRRDGLGGSSRPPALKPRDYNSHSALAEGPGVDEVDPVHHDGDDAVPALEAPGQAVLDEEGVAEHKAVLLISEEDGAFTARADLEGHRRLRQPFPRLVTPNQNLFFRLFRVSWHKSASVNNGESGTGLSTYGLSLRIFFPKLACQQVDSRGPPGIKVRHDQDPGYMHHKFAIVDKRVLITGSLNWTTQAIQNNRENVLITEDDEYVRLFLEEFERIWEQFNPTNHDLPRGAFMSVVRILVWNRNFCYSTEKAQCLFQNTTEKSFDEDNRKSTQQRVVWTTQNASLTHSMPTVNCDNDSNNNNNNKTTVQSLDSKSFNRSCTVRPSFRLWVETEQEEKINTPLDSLHWSGSDQTGTLVDASSVREPGAELANATFLFFRLLTLARTVLIPIPLRKWGVQHLRAEESAGAVELAEVAESHDGIHGALETATGLRGTGDIAAYGPKPSVTEEAKSECQSMMSLSTLCSSANIVQQDFLLQQLLDVFIRDKLMERRNRRTGRTEKARIWEVTDRTVRTWIGEAVARLLLTLACLQVDSRGSPVVGGVVGGGADHHAALRPAVRVVGRHGFEQHLLDGFAGKDRESADLGSDGQNGQDLDWGGGCASAADGVTFSVPVTPHTFRHSYAMHMLYAGIPLKVLQSLMGHKSISSTEVYTKVFALDVAARHRVQFAMPESDAVAMLKQLY

SEQ ID NO: 716 - protein, 432 aa, Homo sapiens
GLRHEVTLRVLLKDALLEPGAGVLSIYYLGKKFLGDLQPDGRIMWQETGQTFNSPSAWATHCKKLVNPAKKSGCGWASVKYKGQKLDKYKATWLRLHQLHTPATAADESPASEGEEEELLMEEEEEDVLAGVSAEDKSRRPLGKSPSEPAHPEATTPGKRVDSKIRVPVRYCMLGSRDLARNPHTLVEVTSFAAINKFQPFNVAVSSNVLFLLDFHSHLTRSEVVGYLGGRWDVNSQMLTVLRAFPCRSRLGDAKTAAAIEEEIYQSLFLRGLSLVGWYHSHPHSPALPSLQDIDAQMDYQLRLQGSSNGFQPCLALLCSPYYSGNPGPESKISPFWVMPPPEQRPSDYGIPMDVEMAYVQDSFLTNDILHEMMLLVEFYKGSPDLVRLQEPWSQEHTYLDKLKISLASRTPKDQSLCHVLEQVCGVLKQGS

SEQ ID NO: 717 - protein, 72 aa, Homo sapiens
KLVTGVIAVAQKGVEGAGSIAAATGFVKKDQLGKNEEGAPQEGILEDMPVDPDNEAYEMPSEEGYQDYEPEA

SEQ ID NO: 718 - protein, 206 aa, Homo sapiens
  misc_feature (1)...(206): Xaa = any amino acid or symbol as shown in the table 8 as set forth in Example 2
IQVEQNRXHFYELSLEYVCKLQEIQERKKFEFVEPMLSFFQGMFTFYHQGHELAKDFNHYKMELQINIQNTRNRFEGTRSEVEELMNKIRQNPKDHKRASQFTAEGYLYVQEKRPAPFGSSWVKHYCMYRKAAKKFNMIPFEHRSGGKLGDGEVFFLKECTKRHTDSIDRRFCFDIEAADRPGVSLTMQAFSEEERKQWLEALGGK

SEQ ID NO: 719 - protein, 146 aa, Homo sapiens; identical to SEQ ID NO: 714
  misc_feature (1)...(146): Xaa = any amino acid or symbol as shown in the table 8 as set forth in Example 2

SEQ ID NO: 720 - protein, 113 aa, Homo sapiens
PGQCPGALAMKSRQKGKKKGSAKERVFGCDLQEHLQHSGQEVPQVLKSCAEFVEEYGVVDGIYRLSGVSSNIQKLRQEFESERKPDLRRDVYLQDIHCVSSLCKAYFRELPDP

SEQ ID NO: 721 - protein, 134 aa, Homo sapiens
EFPRLPDPNVVFPPTPRRWNTQQDSTLERPKTLEFLPRPRPSANRQRLDPWWFVSPSHARSTSPANSSSTETPSNLDSCFASSSSTVEERPGLPALLPFQAGPLPPTERTLLDLDAEGQSQDSTVPLCRAELNT

SEQ ID NO: 722 - protein, 52 aa, Homo sapiens
ALRSCWKLCRSMSSAAGFCASRPGLLFLGLLLLPLVVAFASGKPCIPWRPTP

SEQ ID NO: 723 - protein, 199 aa, Homo sapiens
TNELIHRPQPDSQQRFVPVPTPAKRSARAPSLPAGHLASLPATMPNVLLPPKESNLFKRILKCYEQKQYKNGLKFCKMILSNPKFAEHGETLAMKGLTLNCLGKKEEAYEFVRKGLRNDVKSHVCWHVYGLLQRSDKKYDEAIKCYRNALKLDKDNLQILRDLSLLQIQMRDLEGYRETRYQLLQLRPTQRASWIGYAI

SEQ ID NO: 724 - protein, 370 aa, Homo sapiens
APTPTGQRVVRATPAQSAPVRLRRRSYDVNNPIPSNLKSEAKKAAKILREFTEITSRNGPDKIIPAHVIAKAKGLAILSVIKAGFLVTARGGSGIVVARLPDGKWSAPSAIGIAGLGGGFEIGIEVSDLVIILNYDRAVEAFAKGGNLTLGGNLTVAVGPLGRNLEGNVALRSSAAVFTYCKSRGLFAGVSLEGSCLIERKETNRKFYCQDIRAYDILFGDTPRPAQAEDLYEILDSFTEKYENEGQRINARKAAREQRKSSAKELPPKPLSRPQQSSAPVQLNSGSQSNRNEYKLYPGLSSYHERVGNLNQPIEVTALYSFEGQQPGDLNFQAGDRITVISKTDSHFDWWEGKLRGQTGIFPANYVTMN

SEQ ID NO: 725 - protein, 307 aa, Homo sapiens
CGGIRELEALATLYQKQNKYEQAEHFRKKSFKIHQKAIKKKGNLYGFALLRRRALQLEELTLGKDTPDNARTLNELGVLYYLQNNLETADQFLKRSLEMRERVLGPDHPDCAQSLNNLAALCNEKKQYDKAEELYERALDIRRRALAPDHPSLAYTVKHLAILYKKMGKLDKAVPLYELAVEIRQKSFGPKHPSVATALVNLAVLYSQMKKHVEALPLYERALKIYEDSLGRMHPRVGETLKNLAVLSYEGGDFEKAAELYKRAMEIKEAETSLLGGKAPSRHSSSGDTFSLKTAHSPNVFLQQGQR

SEQ ID NO: 726 - protein, 355 aa, Homo sapiens
  misc_feature (1)...(355): Xaa = any amino acid or symbol as shown in the table 8 as set forth in Example 2
FLSLFRKRLYMEVFEYTRPMMHPEPGKFYQINPEEYGHPNTWKESFQQLYKGAHVKPGFAEHFYSNPARYKGRENMLYYDTIEDALGGVQEAHFDGLIFVHSGIYTDEWIYIESPITMIGAAPGKVADKVIIENTRDSTFVFMEGSEDAYVGYMTIRFNPDDKSAQHHNAHHCLEITVNCSPIIDHCIIRSTCTVGSAVCVSGQGACPTIKHCNISDCENVGIYITDHAHGNYTDGXLKFPIMPLAGIWVKNHGNPIIRRNHIHHGRDVGVFTFDHGMGYFESCNIHRNRIAGFEVKAYANPTVVRCEIHHGQTGGIYVHEKGRGQFIENKIYANNFAGVWITSNSDPTIRGNSI

SEQ ID NO: 727 - protein, 86 aa, Homo sapiens
VKRHASSANQYKYGKNRAEEDARRYLVEKEKLEKEKETIRTELIALRQEKRELKEAIRSSPGAKLKALEEAVATLEAQCRAKEERR

SEQ ID NO: 728 - protein, 161 aa, Homo sapiens
  misc_feature (1)...(161): Xaa = any amino acid or symbol as shown in the table 8 as set forth in Example 2
PHGPKTMEEGGSTGSAGSDSSTSGSGGAQQRELERMAEVLVTGEQLRLRLHEEKVIKDRRHHLKTYPNCFVAKELIDWLIEHKEASDRETAIKLMQKLADRGIIHHVCDEHKEFKDVKLFYRFRKDDGTFPLDNEVKACYERTEAIXKVCSAXNPPCNLDL

SEQ ID NO: 729 - protein, 189 aa, Homo sapiens
  misc_feature (1)...(189): Xaa = any amino acid or symbol as shown in the table 8 as set forth in Example 2
YSAVEFGPTDWLPQTLDSLPYVSQDCLDSGIGSLESQMSELWGVRGGGPGEPGPPRAPYTGYSPYGSELPATAAFSAFGRAMGAGHFSVPADYPPAPPAFPPREYWSEPYPLPPPTSVLQEPPVQSPGAGRSPWGRAGTPGQGAGQRVYXAVWCVSPAPGGGCDGALPTAPGPPAAGCRDPLLQVPAPQ

SEQ ID NO: 730 - protein, 1495 aa, Homo sapiens
PSPEAGGGGGALKASSARAAAAGLLREAGSGGRERADWRRRQLRKVRSVELDQLPEQPLFLAASPPASSTSPSPEPADAAGSGTGFQPVAVPPPHGAASRRGAHLTESVAAPDSGASSPAAAEPGEKRAPAAEPSPAAAPAGREMENKETLKGLHKMDDRPEERMIREKLKATCMPAWKHEWLERRNRRGPVVVKPIPVKGDGSEMNHLAAESPGEVQASAASPASKGRRSPSPGNSPSGRTVKSESPGVRRKRVSPVPFQSGRITPPRRAPSPDGFSPYSPEETNRRVNKVMRARLYLLQQIGPNSFLIGGDSPDNKYRVFIGPQNCSCAHGTFCIHLLFVMLRVFQLEPSDPMLWRKTLKNFEVESLFQKYHSRRSSRIKAPSRNTIQKFVSRMSNSHTLSSSSTSTSSSENSIKDEEEQMCPICLLGMLDEESLTVCEDGCRNKLHHHCMSIWAEECRRNREPLICPLCRSKWRSHDFYSHELSSPVDSPSSLRAAQQQTVQQQPLAGSRRNQESNFNLTHYGTQQIPPAYKDLAEPWIQVFGMELVGCLFSRNWNVREMALRRLSHDVSGALLLANGESTGNSGGSSGSSPSGGATRGFSQTSISGDVVEACCSVLSMVCADPVYKVYVAALKTLRAMLVYTPCHSLAERIKLQRLLQPVVDTILVKCADANSRTSQLSISTLLELCKGQAGKLAVGREILKAGSIGIGGVDYVLNCILGNQTESNNWQELLGRLCLIDRLLLEFPAEFYPHIVSTDVSQAEPVEIRYKKLLSLLTFALQSIDNSHSMVGKLSRRIYLSSARMVTTVPHVFSKLLEMLSVSSVSTHFTRMRRRLMAYADEVEIAEAIQLGVEDTLQRQQHNSFCRHLFPTTIWKPQRTVPLECTVHLEKTGKGLCATKLSASSEDISERLARISVGPSSSTTTTTTTTEQPKPMVQTKGRPHSQCLNSSPLSHHSQLMFPALSTPSSSTPSVPAGTATDVSKHRLQGFIPCRIPSASPQTQRKFSLQFHRNCPENKDSDKLSPVFTQSRPLPSSNIHRPKPSRPTPGNTSKQGDPSKNSMTLDLNSSSKCDDSFGCSSNSSNCCYTSDETVFTPVEEKCRLDVNTELNSSIEDLLEASMPSSDTTVTFKSEVAVLSPEKAENDDTYKDDVNHNQKCKEKMEAEEEEALAIAMAMSASQVALPIVPQLQVENGEDIIIIQQDTPETLPGHTKAKQPYREDTEWLKGQQIGLGAFSSCYQAQDVGTGTLMAVKQGTYVRNTSSEQEEVVEALREEIRMMSHLNHPNIIRMLGATCEKSNYNLFIEWMAGGSVAHLLSKYGAFKESVVINYTEQLLRGLSYLHENQIIHRDVKGANLLIDSTGQRLRIADFGAAARLASKGTGAGEFQGQLLGTIAFMAPEVLRGQQYGRSCDVWSVGCAIIEMACAKPPWNAEKHSNHLALIFKIASATTAPSIPSHLSPGLRDVALRCLELQPQDRPPSRELLKHPVFRTTW

SEQ ID NO: 731 - protein, 343 aa, Homo sapiens
RSCPGLVVLGSPDMSEVKSRKKSGPKGAPAAEPGKRSEGGKTPVARSSGGGGWADPRTCLSLLSLGTCLGLAWFVFQQSEKFAKVENQYQLLKLETNEFQQLQSKISLISEKLESTESILQEATSSMSLMTQFEQEVSNLQDIMHDIQNNEEVLTQRMQSLNEKFQNITDFWKRSLEEMNINTDIFKSEAKHIHSQVTVQINSAEQEIKLLTERLKDLEDSTLRNIRTVKRQEEEDLLRVEEQLGSDTKAIEKLEEEQHALFARDEDLTNKLSDYEPKVEECKTHLPTIESAIHSVLRVSQDLIETEKKMEDLTMQMFNMEDDMLKAVSEIMEMQKTLEGFFL

SEQ ID NO: 732 - protein, 343 aa, Homo sapiens; identical to SEQ ID NO: 731

SEQ ID NO: 733 - protein, 382 aa, Homo sapiens
IVDRCGIPLKEAESLQVAVKASQMGAVSQSCEDSCGDSVLADTLSSHDVPGSPTASLVTGGREGRGCSDVDPGIQGVVTDLAVSDAGEKVECRNFPGSSQSEIIQAIQNLTRLLYSLQAALTIQDSHIEIHRLVLQQQEGLSLGHSILRGGPLQDQKSRDADRQHEELANVHQLQHQLQQEQRRWLRRCEQQQRAQATRESWLQERERECQSQEELLLRSRGELDLQLQEYQHSLERLREGQRLVEREQARMRAQQSLLGHWKHGRQRSLPAVLLPGGPEVMELNRSESLCHENSFFINEALVQMSFNTFNKLNPSVIHQDATYPTTQSHSDLVRTSEHQVDLKVDPSQPSNVSHKLWTAAGSGHQILPFHESSKDSCKNGN

SEQ ID NO: 734 - protein, 354 aa, Homo sapiens
  misc_feature (1)...(354): Xaa = any amino acid or symbol as shown in the table 8 as set forth in Example 2
MPFYISDLSICGDRILRALCPQDLPTYSLHSRGKMRASCSRKFLDNNSSRLVSCNMGALISIWGTTTPPLHATILDSQPTVHPPLAKDCLPCGLQASASDLRARALQRLCQQLPWVGSQPHTRSPSPQRGGKTGLFAGLASSVSMRPASPPSPAADSCSACRFFARRPPLRVTWVKPSSALALCVSISDSIPGNLKALPAETRAQLHHAEASLSQPPLQLRPFPKTSQAGDLQDLGPYVCVRKAVGKGDKQIRAVVKEHSVRSQERIWHYPGITTANMPGHLGQNTESGRDKLPMFGVWFPGCRFWGLWVWRLPXLKLAAPCRPSRSLRSSPISRRASTTRCLTVSGCPAAPNL

SEQ ID NO: 735 - protein, 425 aa, Homo sapiens
NEFTRRKHLELTATMQVEEATGQAAGRRRGNVVRRVFGRIRRFFSRRRNEPTLPREFTRRGRRGAVSVDSLAELEDGALLLQTLQLSKISFPIGQRLLGSKRKMSLNPIAKQIPQVVEACCQFIEKHGLSAVGIFTLEYSVQRVRQLREEFDQGLDVVLDDNQNVHDVAALLKEFFRDMKDSLLPDDLYMSFLLTATLKPQDQLSALQLLVYLMPPCHSDTLERLLKALHKITENCEDSIGIDGQLVPGNRMTSTNLALVFGSALLKKGKFGKRESRKTKLGIDHYVASVNVVRAMIDNWDVLFQVPPHIQRQVAKRVWKSSPEALDFIRRRNLRKIQSARIKMEEDALLSDPVETSAEARAAVLAQSKPSDEGSSEEPAVPSGTARSHDDEEGAGNPPIPEQDRPLLRVPREKEAKTGVSYFFP

SEQ ID NO: 736 - protein, 183 aa, Homo sapiens
  misc_feature (1)...(183): Xaa = any amino acid or symbol as shown in the table 8 as set forth in Example 2
LRVTAQWASHTLPDPVVGNPGSGWKEKDRDSEWGWRDLKSKTWVEVEAEGGLSGDTFQWLPQGSSQRPGLPLVNQGAGVQETKGAGPLXSPAPLPPGSPEGAQASGCSPVGAIGMYPLTGPLPPPPQPRSWISGPSTPILSLCPSPSTRSQGFPPQGLEVCVTPIELLPEVRLKIRECFPSFL

SEQ ID NO: 737 - protein, 249 aa, Homo sapiens
LTSWLLSPAHRRAGRLSSTVESGVRCLVARRSCFHVLASPQVKREVMEGLSDVASFATKLKNTLIQYHSIEEDKWRVAKKTKDVTVWRKPSEEFNGYLYKAQGVIDDLVYSIIDHIRPGPCRLDWDSLMTSLDILENFEENCCVMRYTTAGQLWNIISPREFVDFSYTVGYKEGLLSCGISLDWDEKRPEFVRGYNHPCGWFCVPLKDNPNQSLLTGYIQTDLRGMIPQSAVDTAMASTLTNFYGDLRK

SEQ ID NO: 738 - protein, 301 aa, Homo sapiens
GPGKETLESALIALDSEKPKKLRFHPKQLYFSARQGELQKVLLMLVDGIDPNFKMEHQNKRSPLHAAAEAGHVDICHMLVQAGANIDTCSEDQRTPLMEAAENNHLEAVKYLIKAGALVDPKDAEGSTCLHLAAKKGHYEVVQYLLSNGQMDVNCQDDGGWTPMIWATEYKHVDLVKLLLSKGSDINIRDNEENICLHWAAFSGCVDIAEILLAAKCDLHAVNIHGDSPLHIAARENRYDCVVLFLSRDSDVPLKNKEGETPLQCASLNSQVWSALQMSKALQDSAPDRPSPVERIVSRDI

SEQ ID NO: 739 - protein, 301 aa, Homo sapiens; identical to SEQ ID NO: 738

SEQ ID NO: 740 - protein, 301 aa, Homo sapiens; identical to SEQ ID NO: 738

SEQ ID NO: 741 - protein, 409 aa, Homo sapiens
  misc_feature (1)...(409): Xaa = any amino acid or symbol as shown in the table 8 as set forth in Example 2
MSRGPEEVNRLTESTYRNVMEQFNPGLRNLINLGKNYEKAVNAMILAGKAYYDGVAKIGEIATGSPVSTXTGTCPHRDFKYPQETSTRVFDGKFLKNSTKRLSMSWRRRXNLDVKYMNATLKRYQTEHKNKLESLEKSQAELKKIRRKSQGSRNALKYEHKEIEYVETVTSRQSEIQKFIADGCKEALLEEKRRFCFLVDKHCGFANHIHYYHLQSAELLNSKLPRWQETCVDAIKVPEKIMNMIEEIKTPASTPVSGTPQASPMIERSNVVRKDYDTLSKCSPKMPPAPSGRAYTSPLIDMFNNPATAAPNSQRVNNSTGTSEDPSLQRSVSVATGLNMMKKQKVKTIFPHTAGSNKTLLSFAQGDVITLLIPEEKDGWLYGEHDVSKARGWFPSSYTKLLEENETEA

SEQ ID NO: 742 - protein, 257 aa, Homo sapiens
RFSSFSLIVSALASLNPVTMSDPEGETLRSTFPSYMAEGERLYLCGEFSKAAQSFSNALYLQDGDKNCLVARSKCFLKMGDLERSLKDAEASLQSDPAFCKGILQKAETLYTMGDFEFALVFYHRGYKLRPDREFRVGIQKAQEAINNSVGSPSSIKLENKGDLSFLSKQAENIKAQQKPQPMKHLLHPTKGEPKWKASLKSEKTVRQLLGELYVDKEYLEKLLLDEGFGHFVGTGPWGKGNLGGCFMHELKAEPVI

SEQ ID NO: 743 - protein, 136 aa, Homo sapiens
  misc_feature (1)...(136): Xaa = any amino acid or symbol as shown in the table 8 as set forth in Example 2
AWAQCLPTSPPSCPRGSTSPLWPPLCWAFRAGHKGLGPSSAHDSAGSPAWPXNLPEGQGGLCPPPDPAPAAAGTGPPGYCRWPGRASSSPGRCGRWDWLWGCGCRGPRAAQVPHRAASGWPPAHTGSHRGAHCLGA

SEQ ID NO: 744 - protein, 150 aa, Homo sapiens
  misc_feature (1)...(150): Xaa = any amino acid or symbol as shown in the table 8 as set forth in Example 2
DTLSLNCTLPETLPMTPSFXLSFLXFPGLARAKSIPTKTYSNEVVTLWYRPPDILLGSTDYSTQIDMWXGQVEVWQGPCGKGGGLVTTATQPAAFLFTVPSLPRGVGCIFYEMATGRPLFPGSTVEEQLHFIFRILSEEAWALCAVETHR

SEQ ID NO: 745 - protein, 427 aa, Homo sapiens
CARVAAWGGKLRRGLAVSRQAVRSPGPLAAAVAGAALAGAGAAWHHSRVSVAARDGSFTVSAQKNVEHGIIYIGKPSLRKQRFMQFSSLEHEGEYYMTPRDFLFSVMFEQMERKTSVKKLTKKDIEDTLSGIQTAGCGSTFFRDLGDKGLISYTEYLFLLTILTKPHSGFHVAFKMLDTDGNEMIEKREFFKLQKIISKQDDLMTVKTNETGYQEAIVKEPEINTTLQMRFFGKRGQRKLHYKEFRRFMENLQTEIQEMEFLQFSKGLSFMRKEDFAEWLLFFTNTENKDIYWKNVREKLSAGESISLDEFKSFCHFTTHLEDFAIAMQMFSLAHRPVRLAEFKRAVKVATGQELSNNILDTVFKIFDLDGDECLSHEEFLGVLKNRMHRGLWVPQHQSIQEYWKCVKKESIKGVKEVWKQAGKGLF

SEQ ID NO: 746 - protein, 120 aa, Homo sapiens
  misc_feature (1)...(120): Xaa = any amino acid or symbol as shown in the table 8 as set forth in Example 2
SSTWCPQPTTTPRKPTWSPSCXALASSSSPGSSWPGSATCASSSSSWTSRGWTRPGSGSSAPNCCSCWPSGPRPSQGTSRRSRLSGTLRTSWAASPPVTSIPEEDASAPTGSAPEAGGSA

SEQ ID NO: 747 - protein, 70 aa, Homo sapiens
RGWALDWIGADLSLHLQEEVETEVAWEECGHVLLSLCYSSQQGGLLVGVLRCAHLAPMDANGYSDPFVRL

SEQ ID NO: 748 - protein, 586 aa, Homo sapiens
MVHNQYGTCCLSSGMRECGHTYTSWPPRSLSLESSQIATNSIAQGHQGRGAPQQLVVSRLSEGFITKAANNSAQVIEDMKDTNARCCLLMPHIFTPKSHPNQPTWENGATLRSHGEIYISARNPGIQVESSTWELGVASLEEGINAFHIKNIYVKEDVNGSWVVQEHYHSSKDVESTQVPIHGGLDKENVVPMHDGILRSCKNRMKSCPLFFAATWMQQKAIILSKLMQKRKTKYHMFFITPDQSSQRTSFEVNGHCTSLRGGSKYRSGSVKTLRTIYNFSYHTRSVGRYPSSSAEDWGMKREKSALLITDDTISNEAALVDDGYIIGEMLPPCGRCEKKSREQIVIPFFSLLIKDIYFLNEGCANRLPNGHVNFEKFWELAKQVSEFMTWKQVECPFERDRKILQYLLTVPVFSEDVSGLPVCWRMSVCPSASVLPSVSSRRPAAPQTAPAKLRLIPPVCPACWHLSVCPAGVPFYQCAPLNVLSTTRHLRLLQQMCSSPRPATCVSVCRRSRVFIGPRWGRDHGGAGLCFLASRTTNTHEDPAVIGAPGSAKHTSSLKTRWRTYFLQLTDRLRFCETEMFTEDT

SEQ ID NO: 749 - protein, 775 aa, Homo sapiens
AATHPQMVGPEDAGACSGRNPKLLPVPAPDPVGQDRKVIRATGGFGGGVGAVEPPEEADEEEETPPRQLLQRYLAAAGEQLEPGLCYCPLPAGQAGAPPPSAAPRSDACLLGSGSKHRGAEVADGRAPRHEGMTNGDSGFLPGRDCRDLEEARGLARAGGRESRRRRPYGRLRLEGPGDEDADGAGSPSDWASPLEDPLRSCCLVAADAQEPEGAGSDSGDSPASSCSSSEDSEQRGVGAGGPEEGAPPATSAERTNGGAEPRLGFSDIHFNSRNTFQVSRGQSARDHLPPAGPPVPLPAAEQGPAGASARARRSGGFADFFTRNLFPKRTKDLKSVVHSAPGWKLFGKVPPRENLQKTSKIIQQEYEARTGRTCKPPPQSSRRKNFEFEPLSTTALILEDRPSNLPAKSVEEALRHRQEYDEMVAEAKKREIKEAHKRKRIMKERFKQEENIASAMVIWINEILPNWEVMRSTRRVRELWWQGLPPSVRGKVWSLAVGNELNITPELYEIFLSRAKERWKSFSETSSENDTEGVSVADREASLELIKLDISRTFPSLYIFQKGGPYHDVLHSILGAYTCYRPDVGYVQGMSFIAAVLILNLEEADAFIAFANLLNKPCQLAFFRVDHSMMLKYFATFEVFFEENLSKLFLHFKSYSLTPDIYLIDWIFTLYSKSLPLDLACRVWDVFCRDGEEFLFRTGLGILRLYEDILLQMDFIHIAQFLTKLPEDITSEKLFSCIAAIQMQNSTKKWTQVFASVMKDIKEGDKNSSPALKS

SEQ ID NO: 750 - protein, 92 aa, Homo sapiens
  misc_feature (1)...(92): Xaa = any amino acid or symbol as shown in the table 8 as set forth in Example 2
MSSMNPEYDYLFKLLLRFADDTYTESYISTIGVDFKIRTIELDGKTIKLQIWDTAGQXRFRTITSSYYRGAHGIIVVYDVTDQGSFNNVKQW

SEQ ID NO: 751 - protein, 173 aa, Homo sapiens
RAAWHEGKFGAVCTCMEKATGLKLSAKVIKKQTPKDKEMVLLEIEVMNQLNHRNLIQLYAAIETPHEIVLFMEYIEGGELFERIVDEDYHLTEVDTMVFVRQICDGILFMHKMRVLHLDLKPENILCVNTTGHLVKIIDFGLARRYNPNEKLKVNFGTPEFLSPEVVNYDQIF

SEQ ID NO: 752 - protein, 97 aa, Homo sapiens
  misc_feature (1)...(97): Xaa = any amino acid or symbol as shown in the table 8 as set forth in Example 2
EKLASVSNLVTVFENSRTPEAAPRGHRLEDVHHRPECRPPESPGPREKTNVGEAVGSEPRTVSRRYLNSLKNKLSSEAWRKSCQPVTLSRSXTHVPE

SEQ ID NO: 753 - protein, 134 aa, Homo sapiens
ASVLGKETGFSLSELPRESSYDIYRVPSSQSMEDRGYSPDTRVVRFLKGKSIGLRLAGGNDVGIFVSGVQAGSPADGQGIQEGDQILQVNDVPFQNLTREEAVQFLLGLPPGEEMELVTQRKQDIFWKMVQSRV

SEQ ID NO: 754 - protein, 725 aa, Homo sapiens
  misc_feature (1)...(725): Xaa = any amino acid or symbol as shown in the table 8 as set forth in Example 2
KLLGSRGPRLLPPECRSVACVQALKGSKKLVLSVYSAGRIPGGYVTNHIYTWVDPQGRSISPPSGLPQPHGGALRQQEGDRRSTLHLLQGGDEKKVNLVLGDGRSLGLTIRGGAEYGLGIYITGVDPGSEAEGSGLKVGDQILEVNGRSFLNILHDEAVRLLKSSRHLILTVKDVGRLPHARTTVDETKWIASSRIRETMANSAGFLGDLTTEGINKPGFYKGPAGSQVTLSSLGNQTRVLLEEQARHLLNEQEHATMAYYLDEYRGGSVSVEALVMALFKLLNTHAKFSLLSEVRGTISPQDLERFDHLVLRREIESMKARQPPGPGAGEHLVPWCSYSXHGFHSTGSHGTSTTVSSARNTLDLEETGEAVQGNINALPDVSVDDVRSTSQGLSSFKPLPRPPPLAQGNDLPLGQPRKLGREDLQPPSSMPSCSGTVFSAPQNRSPPAGTAPTPGTSSAQDLPSSPIYASVSPANPSSKRPLDAHLALVNQHPIGPFPRVQSPPHLKSPSAKATVAGGCLLPPSPSGHPDQTGTNQHFVMGEVHRPDSEPDVNEVRALPQTRTASTLSQLSDSGQTLSEDSGVDAGEAEASAPGRGRQSASTKSRSSKELPRKERPTDGANKPPGLLEPTSTLVRVKKSAATLGIAIEGGANTRQPLPRIVTIQRGGSAHNCGQLKVGHVILEVNGLTLRGKEHREAARIIAEAFKTKDRDYIDFLVTEFNVML

SEQ ID NO: 755 - protein, 137 aa, Homo sapiens
PAAGPALWRLPEELLLLICSYLDMRALGRLAQVCHWLRRFTSCDLLWRRIARASLNSGFTRLGTDLMTSVPVKERVKVSQNWRLGRCREGILLKWRCSQMPWMQLEDDSLYISQANFILAYQFRPDGASLNRRPLGV

SEQ ID NO: 756 - protein, 137 aa, Homo sapiens; identical to SEQ ID NO: 755

SEQ ID NO: 757 - protein, 125 aa, Homo sapiens
VLNPRKKCKKKKYVNSGTVTLLSFSVDSEFTFVDYIKGGTQLNFTVAIDFTASNGETRMSEKVGGNPLQPTSLHYMSPYQLSAYAMALKAVGEIIQDYDSDKLFPAYGFGAKLPPEGRISHQFPL

SEQ ID NO: 758 - protein, 218 aa, Homo sapiens
  misc_feature (1)...(218): Xaa = any amino acid or symbol as shown in the table 8 as set forth in Example 2
QSMEENQDLKKELLKCKQEARNLQGIKDALQQRLTQQDTSVLQLKQELLRANMDKDELHNQNVDLQRKLDERNRLLGEYKKELGQKDRLLQQHQAKLEEALRKLSDVSYHQVDLERELEHKDVLLAHCMKREADEATNYNSHNSQSNGFLLPTAGKGATSVSNRGTSDLQLVRDALRSLRNSFSGHDPQHHTIDSLEQGISSLMERLHVMETXKKKKK

SEQ ID NO: 759 - protein, 458 aa, Homo sapiens
LARPAQPVLLREPEGAGPPVPAGHLVHHLQGGHLRERAHPDLEAHEHPLPCDQMFWRQMGGHLRMVEANSRGVVWGIGYDHTAWVYTGGYGGGCFQGLASSTSNIYTQSDVKCVHIYENQRWNPVTGYTSRGLPTDRYMWSDASGLQECTKAGTKPPSLQWAWVSDWFVDFSVPGGTDQEGWQYASDFPASYHGSKTMKDFVRRRCWARKCKLVTSGPWLEVPPIALRDVSIIPESPGAEGSGHSIALWAVSDKGDVLCRLGVSELNPAGSSWLHVGTDQPFASISIGACYQVWAVARDGSAFYRGSVYPSQPAGDCWYHIPSPPRQRLKQVSAGQTSVYALDENGNLWYRQGITPSYPQGSSWEHVSNNVCRVSVGPLDQVWVIANKVQGSHSLSRGTVCHRTGVQPHEPKGHGWDYGIGGGWDHISVRANATRAPRSSSQEQEPSAPPEAHGPVCC

SEQ ID NO: 760 - protein, 329 aa, Homo sapiens
  misc_feature (1)...(329): Xaa = any amino acid or symbol as shown in the table 8 as set forth in Example 2
SSRPVRPRPAARLSAMSSTQFNKGPSYGLSAQVKNRLLSKYDPQKEAELRTWIEGLTGLSIGPDFQKGLKDGTILCTLMNKLQPGSVPKINRSMQNWHQLENLSNFIKAMVSYGMNPVDLFEANDLFESGNMTQVQVSLLALGGKRPKTKGAAEGGLDIGVKYSEKQERNFDDATMKAGQCVIGLQMGTNKCASQSGMTAYGTRRHLYDPKNHILPPMDHSTISLQMGTNKCASQVGMTAPGTRRHIYEYQAGNPTSCDNFSMSLQMGYTQGAQTQSGQVFGPGRPDIXTPSTCPQGTIADGAPSGTGDCPDPGEVPEYPPYYQEEAGY

SEQ ID NO: 761 - protein, 224 aa, Homo sapiens
  misc_feature (1)...(224): Xaa = any amino acid or symbol as shown in the table 8 as set forth in Example 2
SLVGSGVYGLGAGEVCAAATSAAIPSRAPAPRTRGRAGLPTEPRGPAAVVSRPPAWKSVXASKMSSIKHLVYAVIRFLREQSQMDTYTSDEQESLEVAIQCLETVFKISPEDTHLAVSQPLTEMFTSSFCKNDVLPLSNSVPEDVGKADQLKDEGNNHMKEENYAAAVDCYTQAIELDPNNAVYYCNRAAAQSKLRHYTDAIKDCEKAIAIDSQYSKAYGRMGL

SEQ ID NO: 762 - protein, 284 aa, Homo sapiens
  misc_feature (1)...(284): Xaa = any amino acid or symbol as shown in the table 8 as set forth in Example 2
RPPAARARRWLPKPSPARRSRRPAHRCSRRRRTCTPQATRPGMRXAPAAACGPTGRRSRLPALKLALEYIVPCMNKHGICVVDDFLGKETGQQIGDEVRALHDTGKFTDGQLVSQKSDSSKDIRGDKITWIEGKEPGCETIGLLMSSMDDLIRHCNGKLGSYKINGRTKAMVACYPGNGTGYVRHVDNPNGDGRCVTCIYYLNKDWDAKVSGGILRIFPEGKAQFADIEPKFDRLLFFWSDRRNPHEVQPAYATRYAITVWYFDADERARAKVKYRNRXKRCEG

SEQ ID NO: 763 - protein, 275 aa, Homo sapiens; identical to SEQ ID NO: 305

SEQ ID NO: 764 - protein, 500 aa, Homo sapiens
IPGSTISSPLQGRPAELLGRCQRPCHRHVADMVISESMDILFRIRGGLDLAFQLATPNEIFLKKALKHVLSDLSTKLSSNALVFRICHSSVYIWPSSDINTIPGELTDASACKNILRFIQFEPEEDIKRKFMRKKDKKLSDMHQIVNIDLMLEMSTSLAAVTPIIERESGGHHYVNMTLPVDAVISVAPEETWGKVRKLLVDAIHNQLTDMEKCILKYMKGTSIVVPEPLHFLLPGKKNLVTISYPSGIPDGQLQAYRKELHDLFNLPHDRPYFKRSNAYHFPDEPYKDGYIRNPHTYLNPPNMETGMIYVVQGIYGYHHYMQDRIDDNGWGCAYRSLQTICSWFKHQGYTERSIPTHREIQQALVDAGDKPATFVGSRQWIGSIEVQLVLNQLIGITSKILFVSQGSEIASQGRELANHFQSEGTPVMIGGGVLAHTILGVAWNEITGQIKFLILDPHYTGAEDLQVILEKGWCGWKGPDFWNKDAYYNLCLPQRPNMI

SEQ ID NO: 765 - protein, 220 aa, Homo sapiens
RTRGINTSSRLLNLRQVSKTRLSEPGTDLVEPSPKHTPNTSDNEGSDTEVCGPNSPSKRGNSTGIKLVRKEGGLDDSVFIAVKEIGRDLYRGLPTEERIQKLEFMLDKLQNEIDQELEHNNSLVREEKETTDTRKKSLLSAALAKSGERLQALTLLMIHYRAGIEDIETLESLSLDQHSKKISKYTDDTEEDLDNEISQLIDSQPFSSISDDLFGPSESV

SEQ ID NO: 766 - protein, 381 aa, Homo sapiens
GSHQKQMLVPCFLYSLQNRKPSLYGSLTCQGIGLDGIPEVTASEGFTVNEINKKSIHISCPKENASSKFLAPYTTFSRIHTKSITCLDISSRGGLGVSSSTDGTMKIWQASNGELRRVLEGHVFDVNCCRFFPSGLVVLSGGMDAQLKIWSAEDASCVVTFKGHKGGILDTAIVDRGRNVVSASRDGTARLWDCGRSACLGVLADCGSSINGVAVGAADNSINLGSPEQMPSEREVGTEAKMLLLAREDKKLQCLGLQSRQLVFLFIGSDAFNCCTFLSGFLLLAGTQDGNIYQLDVRSPRAPVQVIHRSGAPVLSLLSVRDGFIASQGDGSCFIVQQDLDYVTELTGADCDPVYKVATWEKQIYTCCRDGLVRRYQLSDL

SEQ ID NO: 767 - protein, 147 aa, Homo sapiens
HPLGSGSAPGNHYLLTLVSSCPSVAPVLEGAGDRHSHLSGLELLLCPHALVDTVPAPPSALHGDTHAHTHTHVHTHCPIAQETCRGPPLGASRLSPQGPGHLTLAPQEGSYLDFWDTHRGDPKPRRRRKSLKTFSLTPATFRGIWAL

SEQ ID NO: 768 - protein, 129 aa, Homo sapiens
  misc_feature (1)...(129): Xaa = any amino acid or symbol as shown in the table 8 as set forth in Example 2
PEKATVVNQDGQPLIEXKLKEKQVRWKFIKRWKTRYFTLAGNQLLFQKGKSKDDPDDCPIELIKVQSVKAVAKKRRDRSLPRAFEIFTDNKTYVFKAKDEKNAEEWLQCINVAVAQAKERESREVTTYL

SEQ ID NO: 769 - protein, 397 aa, Homo sapiens
  misc_feature (1)...(397): Xaa = any amino acid or symbol as shown in the table 8 as set forth in Example 2
RSPSRDHHGDPSAGPRLREVESRGTTFLLLSFPSSVGKGLSPASASKMKNYKAIGKIGEGTFSEVMKMQSLRDGNYYACKQMKQRFESDRKSGSLALICELMDMNIYELIRGRRYPLSEKKIMHYMYQLCKSLDHIHRNGIFHRDVKPENILIKDVLKLGDFGSCRSVYSKQPYTEYISTRWYRAPECLLTDGFYTYKMDLWSAGCVFYEIASLQPLFPGVNELDQISKIHDVIGTPAQKILTKFKQSRAMNFDFPFKKGSGIPLLTTNLSPQCLSLLHAMVGYDPDERIAAHQALQHPYFQEQQKQSLKQEEDRPKRRGPAYVMELPKLKLSGVVRLSSYSSPTLQSVLGSGTNGRVRLLRPXKCIPASKKTDPRKDLKPAPQQCRLPTIVRKGGR

SEQ ID NO: 770 - protein, 597 aa, Homo sapiens
LGLGSGTLLSVSEYKKKYREHVLQLHARVKERNARSVKITKRFTKLLIAPESAAPEEALGPAEEPEPGRARRSDTHTFNRLFRRDEEGRRPLTVVLQGPAGIGKTMAAKKILYDWAAGKLYQGQVDFAFFMPCGELLERPGTRSLADLILDQCPDRGAPVPQMLAQPQRLLFILDGADELPALGGPEAAPCTDPFEAASGARVLGGLLSKALLPTALLLVTTRAAAPGRLQGRLCSPQCAEVRGFSDKDKKKYFYKFFRDERRAERAYRFVKENETLFALCFVPFVCWIVCTVLRQQLELGRDLSRTSKTTTSVYLLFITSVLSSAPVADGPRLQGDLRNLCRLAREGVLGRRAQFAEKELEQLELRGSKVQTLFLSKKELPGVLETEVTYQFIDQSFQEFLAALSYLLEDGGVPRTAAGGVGTLLRGDAQPHSHLVLTTRFLFGLLSAERMRDIERHFGCMVSERVKQEALRWVQGQGQGCPGVAPEVTEGAKGLEDTEEPEEEEEGEEPNYPLELLYCLYETQEDAFVRQALCRFPELALQRVRFCRMDVAVLSYCVRCCPAGQALRLISCRLVAAQEKKKKSLGKRLQASLGGG

SEQ ID NO: 771 - protein, 154 aa, Homo sapiens
EDREDHVPKLEQINSTRILSSQNFTLTKKELLSTELLLLEAFSWNLCLPTPAHFLDYYLLASVSQKDHHCHTWPTTCPRKTKECLKEYAHYFLEVTLQDHIFYKFQPSVVAAACVGASRICLQLSPYWTRDLQRISSYSLEHLSTCIEILLVVY

SEQ ID NO: 772 - protein, 252 aa, Homo sapiens
  misc_feature (1)...(252): Xaa = any amino acid or symbol as shown in the table 8 as set forth in Example 2
GQCPGCIQFTKLSSGRCMELEMCIITEENREDLVQRGDECGRATASLVFHIYIWYMYFLYIYLYILHPGIPVICTISQGDMGASKARQERVRQGRGSDGAGWGLAHRSCRSFSDCKRAPGSGRRQVPGSKASPPAPRPACDPPPSPQTSSSSGPASCRSSCAACRTAPPPRCPAAAPARAEAPTAGTAARAWPRRCGYAXWGRPPVADVPAAAGRVSRGTARAAAAGPPAGSLSPAAGRAPRTGWVGAAARR

SEQ ID NO: 773 - protein, 218 aa, Homo sapiens
DFAAKKRRENLRAGEILTLDLASEGSPHARQASEIRQHVLNTTRLVNNLLDMARIQSGGFNLKKEWLTLEEVVGSALQMLEPGLSSPINLSLPEPLTLIHVDGPLFERVLINLLENAVKYAGAQAEIGIDAHVEGENLQLDVWDNGPGLPPGQEQTIFDKFARGNKESAVPGVGLGLAICRAIVDVHGGTITASTDRKVVPVFVLHFPQQMALNLKIS

SEQ ID NO: 774 - protein, 159 aa, Homo sapiens
  misc_feature (1)...(159): Xaa = any amino acid or symbol as shown in the table 8 as set forth in Example 2
LRQYSVKMRIVPTILLNFGADPDLRDIRYNTVLHYAVCGQSLSLVEKLLEYEADLEAKNKDGYTPLLVARYXQLIPKLVKFLLEKGADVNASDNYQRTALILAVSGEPPCLVKLLLQQGGEICNEGMVDSQLRNMFISMVLLHRYPQFTASHGKQKHAK

SEQ ID NO: 775 - protein, 440 aa, Homo sapiens
EFLGSGVSPDLANEDGLTALHQCCIDDFREMVQQLLEAGANINACDSECWTPLHAAATCGHLHLVELLIASGANLLAVNTDGNMPYDLCDDEQTLDCLETAMADRGITQDSIEAARAVPELRMLDDIRSRLQAGADLHAPLDHGATLLHVAAANGFSEAAALLLEHRASLSAKDQDGWEPLHAAAYWGQVPLVELLVAHGADLNAKSLMDETPLDVCGDEEVRAKLLELKHKHDALLRAQSRQRSLLRRRTSSAGSRGKVVRRVSLTQRTDLYRKQHAQEAIVWQQPPPTSPEPPEDNDDRQTGAELRPPPPEEDNPEVVRPHNGRVGGSPVRHLYSKRLDRSVSYQLSPLDSTTPHTLVHDKAHHTLADLKRQRAAAKLQRPPPEGPESPETAEPGLPGDTVTPQPDCGFRAGGDPPLLKLTAPAVEAPVERRPCCLLM

SEQ ID NO: 776 - protein, 180 aa, Homo sapiens
PLSPCQGPLSVFSAKNRWRLVGPVHLTRGEGGFGLTLRGDSPVLIAAVIPGSQAAAAGLKEGDYIVSVNGQPCRWWRHAEVVTELKAAGEAGASLQVVSLLPSSRLPSLGDRRPVLLGPRGLLRSQREHGCKTPASTWASPRPLLNWSRKAQQGKTGGCPQPCAPVKPAPPSSLKHPGWP

SEQ ID NO: 777 - protein, 349 aa, Homo sapiens
TRDELDQFLDKMDDPDYWRTVQDPMTGRDLRLTDEQVALVRRLQSGQFGDVGFNPYEPAVDFFSGDVMIHPVTNRPADKRSFIPSLVEKEKVSRMVHAIKMGWIQPRRPRDPTPSFYDLWAQEDPNAVLGRHKMHVPAPKLALPGHAESYNPPPEYLLSEEERLAWEQQEPGERKLSFLPRKFPSLRAVPAYGRFIQERFERCLDLYLCPRQRKMRVNVDPEDLIPKLPRPRDLQPFPTCQALVYRGHSDLVRCLSVSPGGQWLVSGSDDGSLRLWEVATARCVRTVPVGGVVKSVAWNPNPAVCLVAAAVEDSVLLLNPTLGDRLVAGSTDQLLSAFVPPEEPPLQPA

SEQ ID NO: 778 - protein, 192 aa, Homo sapiens
THLWPHQRPFLFAFLRWQDCKFTCHPECRSLIQLDCSQQEGLSRDRPSPESTLTVTFSQNVCKPVEETQRPPTLQEIKQKIDSYNTREKNCLGMKLSEDGTYTGFIKVHLKLRRPVTVPAGIRPQSIYDAIKEVNLAATTDKRTSFYLPLDAIKQLHISSTTTVSEVIQGLLKKFMVVDNPQKFALFKRIHK

SEQ ID NO: 779 - protein, 280 aa, Homo sapiens
IRVIGESDIMQEFLSESDENYNGVSDVELRVALPDGTTVTVRVKKNSTTDQVYQAIAAKVGMDSTTVNYFALFEVISHSFVRKLAPNEFPHKLYIQNYTSAVPGTCLTIRKWLFTTEEEILLNDNDLAVTYFFHQAVDDVKKGYIKAEEKSYQLQKLYEQRKMVMYLNMLRTCEGYNEIIFPHCACDSRRKGHVITAISITHFKLHACTEEGQLENQVIAFEWDEMQRWDTDEEGMAFCFEYARGEKKPRWVKIFTPYFNYMHECFERVFCELKWRKEEY

SEQ ID NO: 780 - protein, 397 aa, Homo sapiens
VLSDLCLFYYRDEKEEGILGSILLPSFQIALLTSEDHINRKYAFKAAHPNMRTYYFCTDTGKEMELWMKAMLDAALVQTEPVKRVDKITSENAPTKETNNIPNHRVLIKPEIQNNQKTKEMSKIEEKKALEAEKYGFQKDGQDRPLTKINSVKLNSLPSEYESGSACPAQTVHYRPINLSSSENKIVNVSLADLRGGNRPNTGPLYTEADRVIQRTNSMQQLEQWIKIQKGRGHEEETRGVISYQTLPRNMPSHRAQIMARYPEGYRTLPRNSKTRPESICSVTPSTHDKTLGPGAEEKRRSMRDDTMWQLYEWQQRQFYNKQSTLPRHSTLSSPKTMVNISDQTMHSIPTSPSHGSIAAYQGYSPQRTYRSEVSSPIQRGDVTIDRRHRAHHPKVK

SEQ ID NO: 781 - protein, 180 aa, Homo sapiens
SGSSHASDGSGFQELRICSEDQTPLIAGMCSLPMARYYIIKYADQKALYTRDGQLLVGDPVADNCCAEKICTLPNRGLDRTKVPIFLGIQGGSRCLACVETEEGPSLQLEDVNIEELYKGGEEATRFTFFQSSSGSAFRLEAAAWPGWFLCGPAEPQQPVQLTKESEPSARTKFYFEQSW

SEQ ID NO: 782 - protein, 224 aa, Homo sapiens
VNSATEDRRSIRGLDSTPPQSRRCCAMPGVGNSGPSTFSSETAHPCSRKKVHFGSIHDAVRAGDVKQLSEIVVRGASINELDVLHKFTPLHWAAHSGSLECLHWLLWHGADITHVTTRGWTASHIAAIRGQDACVQALIMNGANLTAQDDRGCTPLHLAATHGHSFTLQIMLRSGVDPSVTDKREWRPVHYAAFHGRLGCLQLLVKWGCSIEDVDYNGNLPEPP

SEQ ID NO: 783 - protein, 255 aa, Homo sapiens
PLELEQTIRFRKKVEKDENYVNAIMQLGSIMEHCIKQNNAIDIYEEYFNDEEAMEVMEEDPSAKTINVFRDPQEIKRAATHLSWHPDGNRKLAGAYSCLDFQRAPVGMSSDSYIWDLENPNKPELALKPSSPLVTLEFNPKDSHVLLGGCYNGQIACWDTRKGSLVAELSTIESSHRDPVYGTIWLQSKTGTECFSASTDGQVMWWDIRKMSEPTEVVILDITKKEQLENALGAISLEFESTLVSVPCCPFPDLH

SEQ ID NO: 784 - protein, 137 aa, Homo sapiens
FKGIRSLEIKGFMHHWSYPCAVLQLRQPGSALTPLKLPCQSPGGLPGAEVTYMNMTAYNKGRLQSSFWIVDKQHVYIGSAGLDWQSLGQMKELGVIFYNCSCLVLDLQRIFALYSSLKFKSRVPQTWSKRLYGVYDN

SEQ ID NO: 785 - protein, 131 aa, Homo sapiens
  misc_feature (1)...(131): Xaa = any amino acid or symbol as shown in the table 8 as set forth in Example 2
NKGPGDWRQDGGFPYLTQPWPSPKARLSTLWPQQEVSPGPGDTWLDKALQPGRPRLSLTQWLCGAGHXLPPCPLPSLPPPTAXHVNCVPRTAVVGTGYANWNDSRTKIKLGQEEGASQGALLGPESPSSLL

SEQ ID NO: 786 - protein, 182 aa, Homo sapiens
EGTAEAFVNSINAPASERTLWARERTQDLAPLEKHSVGENTMVTKTHDQPVEEEDRYQGEDPESPFTQSDEGSSETPNSLASEEGNSSSETGELPVQGDSQSQGDQHGESVQGGHNNNPDTQRQGTPGEKNRALEAVVPAVRGEDVQLTEDQEQPARGEHKNQGPRTKGPGAAVELNVHSDP

SEQ ID NO: 787 - protein, 234 aa, Homo sapiens
  misc_feature (1)...(234): Xaa = any amino acid or symbol as shown in the table 8 as set forth in Example 2
RLPTGHQFSGVEGLILLQSPKSVAEGRRRLGVQSGFSLPRFDGSFFWGQVMKVLRHKYLINFYRAIESTSRVYIILELAQGGDVLEWIQRYGACSEPLAGKWFSQLTLGIAYLHSKSIVHRXGRCHPDWGLCPQGGFMHISHFLSFFPLSTLPPQYLAYSCTLFXSYGQGYXXSTHCMQSILXNTMVSSRWSSDTILCLSPYFGLCSQLHGFPSSLPCAIIMVSTSHFLCPHLY

SEQ ID NO: 788 - protein, 234 aa, Homo sapiens; identical to SEQ ID NO: 787
  misc_feature (1)...(234): Xaa = any amino acid or symbol as shown in the table 8 as set forth in Example 2

SEQ ID NO: 789 - protein, 125 aa, Homo sapiens
YNQKVDLFSLGIIFFEMSYHPMVTASERIFVLNQLRDPTSPKFPEDFDDGEHAKQKSVISWLLNHDPAKRPTATELLKSELLPPPQMEESELHEVLHHTLTNVDGKAYRTIDGPRSFRQRISPAI

SEQ ID NO: 790 - protein, 1654 aa, Homo sapiens
RWPRRARLLRRGRGGGGVESLPHFGAPVPRARLQLTARRGHAGLRARMREAAAALVPPPAFAVTPAAAMEEPPPPPPPPPPPPEPETESEPECCLAARQEGTLGDSACKSPESDLEDFSDETNTENLYGTSPPSTPRQMKRMSTKHQRNNVGRPASRSNLKEKMNAPNQPPHKDTGKTVENVEEYSYKQEKKIRAALRTTERDHKKNVQCSFMLDSVGGSLPKKSIPDVDLNKPYLSLGCSNAKLPVSVPMPIARPARQTSRTDCPADRLKFFETLRLLLKLTSVSKKKDREQRGQENTSGFWLNRSNELIWLELQAWHAGRTINDQDFFLYTARQAIPDIINEILTFKVDYGSFAFVRDRAGFNGTSVEGQCKATPGTKIVGYSTHHEHLQRQRVSFEQVKRIMELLEYIEALYPSLQALQKDYEKYAAKDFQDRVQALCLWLNITKDLNQKLRIMGTVLGIKNLSDIGWPVFEIPSPRPSKGNEPEYEGDDTEGELKELESSTDESEEEQISDPRVPEIRQPIDNSFDIQSRDCISKKLERLESEDDSLGWGAPDWSTEAGFSRHCLTSIYRPFVDKALKQMGLRKLILRLHKLMDGSLQRARIALVKNDRPVEFSEFPDPMWGSDYVQLSRTPPSSEEKCSAVSWEELKAMDLPSFEPAFLVLCRVLLNVIHECLKLRLEQRPAGEPSLLSIKQLVRECKEVLKGGLLMKQYYQFMLQEVLEDLEKPDCNIDAFEEDLHKMLMVYFDYMRSWIQMLQQLPQASHSLKNLLEEEWNFTKEITHYIRGGEAQAGKLFCDIAGMLLKSTGSFLEFGLQESCAEFWTSADDSSASDEIIRSVIEISRALKELFHEARERASKALGFAKMLRKDLEIAAEFRLSAPVRDLLDVLKSKQYVKVQIPGLENLQMFVPDTLAEEKSIILQLLNAAAGKDCSKDSDDVLIDAYLLLTKHGDRARDSEDSWGTWEAQPVKVVPQVETVDTLRSMQVDNLLLVVMQSAHLTIQRKAFQQSIEGLMTLCQEQTSSQPVIAKALQQLKNDALELCNRISNAIDRVDHMFTSEFDAEVDESESVTLQQYYREAMIQGYNFGFEYHKEVVRLMSGEFRQKIGDKYISFARKWMNYVLTKCESGRGTRPRWATQGFDFLQAIEPAFISALPEDDFLSLQALMNECIGHVIGKPHSPVTGLYLAIHRNSPRPMKVPRCHSDPPNPHLIIPTPEGFSTRSMPSDARSHGSPAAAAAAAAAVAASRPSPSGGDSVLPKSISSAHDTRGSSVPENDRLASIAAELQFRSLSRHSSPTEERDEPAYPRGDSSGSTRRSWELRTLISQSKDTASKLGPIEAIQKSVRLFEEKRYREMRRKNIIGQVCDTPKSYDNVMHVGLRKVTFKWQRGNKIGEGQYGKVYTCISVDTGELMAMKEIRFQPNDHKTIKETADELKIFEGIKHPNLVRYFGVELHREEMYIFMEYCDEGTLEEVSRLGLQEHVIRLYSKQITIAINVLHEHGIVHRDIKGANIFLTSSGLIKLGDFGCSVKLKNNAQTMPGEVNSTLGTAAYMAPEVITRAKGEGHGRAADIWSLGCVVIEMVTGKRPWHEYEHNFQIMYKVGMGHKPPIPERLSPEGKDFLSHCLESDPKMRWTASQLLDHSFVKVCTDEE

SEQ ID NO: 791 - protein, 137 aa, Homo sapiens
SRAAALLEAVTETLFYYEVAEKIWSNRANRQCADCGSSRPDWAAVNLGVVICKQCAGQHRALGSGISKVQSLKLDTSVWSNEIVQLFIVLGNDRANRFWAGTLPPGEGLHPDATPGPRGEFISRKYRLGLFRKPHPQ

SEQ ID NO: 792 - protein, 265 aa, Homo sapiens
SSCFQTSSHACFVTEFVPGGDPMMQIHEDVFPEPQARFYVACVVLGLQFLHEKKIIYRDLKLDNLLLDAQGFLKIADFGLCKEGIGFGDRTSTFCGTPEFLAPEVLTQEAYTRAVDWWGLGVLLYEMLVGECPFPGDTEEEVFDCIRLHGRPPTPAFLSVQGVKFIQKLLQKCPEKPLGAGDQNAEEIKVQPFFRPTNWQALLARTIQPPFVPTLCGPADLRYFEGEFHRAAPALTPPAPHSLLTARQQAAFRDFDFVSERFLEP

SEQ ID NO: 793 - protein, 698 aa, Homo sapiens
HLLIAQELADRVGEGRACWSLGNAYVSMGRPAQALTFAKKHLQISQEIGDRHGELTARMNVAQLQLVLGRLTSPAASEKPDLAGYEAQGARPKRTQRLSAETWDLLRLPLEREQNGDSHHSGDWRGPSRDSLPLPVRSRKYQEGPDAERRPREGSHSPLDSADVRVHVPRTSIPRAPSSDEECFFDLLTKFQSSRMDDQRCPLDDGQAGAAEATAAPTLEDRIAQPSMTASPQTEEFFDLIASSQSRRLDDQRASVGSLPGLRITHSNAGHLRGHGEPQEPGDDFFNMLIKYQSSRIDDQRCPPPDVLPRGPTMPDEDFFSLIQRVQAKRMDEQRVDLAGGPGAGGRRPARAPAAVPAWCELRPCAHRQAHPAPTPGRRSHSHSHVLPRPLPRTGTGHAAPRPPRPRATGSGQAARGGRACFHPGLAPMALSFLPSAPAAGRTGPSACRPRPGAVRLPHPLPQALPVLPCPAKCETLLSPSPSPKVSLSRLLGPPRTGPCSVPPELVLGWPCDRHAPPLQLRPGAGLPPSLSPHSPARGQQPQKAPQTTHGRPGCSGSPEVPPAESQGPAGASTGAGPISKAEGMAGHELRHSKTPSQEKGQGLVLGMLTGSKSSAQSGWEVAPGSVTLTQVGGWSVEAGEASLSSTLQTPHMRTPLLPPAGGDDITALSMGRGLTGHQVRDPRTGRTCWSLRWAPGA

SEQ ID NO: 794 - protein, 255 aa, Homo sapiens
PSSIPSPELPQKNQRLEKYKDVIGCLPRVTRRTLATLIGHLYRVQKCAALNQMCTRNLALLFAPSVFQTDGRGEHEVRVLQELIDGYISVFDIDSDQVAQIDLEVSLITTWKDVQLSQAGDLIMEVYIEQQLPDNCVTLKVSPTLTAEELTNQVLEMRGTAAGMDLWVTFEIREHGELERPLHPKEKVLEQALQWCQLPEPCSASLLLKKVPLAQAGCLFTGIRRESPRVGLFAVFVRSHLACWGSRFQERFFLV

SEQ ID NO: 795 - protein, 102 aa, Homo sapiens
PSECAGIRRLKKTDIPLLQRLLQGPSEKNARIFLMDKDAEEISSDVAQYINFHFSLLESILQRLNEEEKREIQRIVTKFNKEKAIILKCLQNKLVIKTETTV

SEQ ID NO: 796 - protein, 47 aa, Homo sapiens
MHLLCFLDFPLLMQQTFLHHVKRMRPFSSQNFYLAITFHHRLTMTSR

SEQ ID NO: 797 - protein, 132 aa, Homo sapiens
FRGTPVSGLTNRDTLAVIRHFREPIRLKTVKPGKVINKDLRHYLSLQFQKGSIDHKLQQVIRDNLYLRTIPCTTRAPRDGEVPGVDYNFISVEQFKALEESGALLESGTYDGNFYGTPKPPAEPSPFQPDPV

SEQ ID NO: 798 - protein, 214 aa, Homo sapiens
RRTFSRASVRRREFLQAISKPCGSATAPRGCPPPWPLSGISHTPNVKVSRLLILGGANVNYRTEVLNNAPILCVQSHLGHEEVVTLLLEFGACLDGTSENGMTALCYAAAAGHMKLVCLLTKKGVRVDHLDKKGQCALVHSALRGHGDILQYLLTCEWSPGPPQPGTLRKSHALQQALTAAASMGHSSVVQCLLGMEKEHEVEVNGTDTLWGET

SEQ ID NO: 799 - protein, 214 aa, Homo sapiens; identical to SEQ ID NO: 798

SEQ ID NO: 800 - protein, 165 aa, Homo sapiens
FRKVECTPSREHLKHQTVYRLLKCAPRGKNGFTPLHMAVDKDTTNVGRYPVGRFPSLHVVKVLLDCGADPDSRDFDNNTPLHIAAQNNCPAIMNALIEAGAHMDATNAFKKTAYELLDEKLLARGTMQPFNYVTLQCLAARALDKNKIPYKGFIPEDLEAFIELH

SEQ ID NO: 801 - protein, 1677 aa, Homo sapiens
CDRCQEGHFGFNGCGGCRPCACGPAAEGSECHPQSGQCHCRPGTMGPQCRECAPGYWGLPEQGCRRCQCPGGRCDPHTGRCNCPPGLSGERCDTCSQQHQVPVPGGPVGHSIHCEVCDHCVVLLLDDLERAGALLPAIHEQLRGINASSMAWARLHRLNASIADLQSQLRSPLGPRHETAQQLEVLEQQSTSLGQDARRLGGQAVGTRDQASQLLAGTEATLGHAKTLLAAIRAVDRTLSELMSQTGHLGLANASAPSGEQLLRTLAEVERLLWEMRARDLGAPQAAAEAELAAAQRLLARVQEQLSSLWEENQALATQTRDRLAQHEAGLMDLREALNRAVDATREAQELNSRNQERLEEALQRKQELSRDNATLQATLHAARDTLASVFRLLHSLDQAKEELERLAASLDGARTPLLQRMQTFSPAGSKLRLVEAAEAHAQQLGQLALNLSSIILDVNQDRLTQRAIEASNAYSRILQAVQAAEDAAGQALQQADHTWATVVRQGLVDRAQQLLANSTALEEAMLQEQQRLGLVWAALQGARTQLRDVRAKKDQLEAHIQAAQAMLAMDTDETSKKIAHAKAVAAEAQDTATRVQSQLQAMQENVERWQGQYEGLRGQDLGQAVLDAGHSVSTLEKTLPQLLAKLSILENRGVHNASLALSASIGRVRELIAQARGAASKVKVPMKFNGRSGVQLRTPRDLADLAAYTALKFYLQGPEPEPGQGTEDRFVMYMGSRQATGDYMGVSLRDKKVHWVYQLGEAGPAVLSIDEDIGEQFAAVSLDRTLQFGHMSVTVERQMIQETKGDTVAPGAEGLLNLRPDDFVFYVGGYPSTFTPPPLLRFPGYRGCIEMDTLNEEVVSLYNFERTFQLDTAVDRPCARSKSTGDPWLTDGSYLDGTGFARISFDSQISTTKRFEQELRLVSYSGVLFFLKQQSQFLCLAVQEGSLVLLYDFGAGLKKAVPLQPPPPLTSASKAIQVFLLGGSRKRVLVRVERATVYSVEQDNDLELADAYYLGGVPPDQLPPSLRRLFPTGGSVRGCVKGIKALGKYVDLKRLNTTGVSAGCTADLLVGRAMTFHGHGFLRLALSNVAPLTGNVYSGFGFHSAQDSALLYYRASPDGLCQVSLQQGRVSLQLLRTEVKTQAGFADGAPHYVAFYSNATGVWLYVDDQLQQMKPHRGPPPELQPQPEGPPRLLLGGLPESGTIYNFSGCISNVFVQRLLGPQRVFDLQQNLGSVNVSTGCAPALQAQTPGLGPRGLQATARKASRRSRQPARHPACMLPPHLRTTRDSYQFGGSLSSHLEFVGILARHRNWPSLSMHVLPRSSRGLLLFTARLRPGSPSLALFLSNGHFVAQMEGLGTRLRAQSRQRSRPGRWHKVSVRWEKNRILLVTDGARAWSQEGPHRQHQGAEHPQPHTLFVGGLPASSHSSKLPVTVGFSGCVKRLRLHGRPLGAPTRMAGVTPCILGPLEAGLFFPGSGGVITLDLPGATLPDVGLELEVRPLAVTGLIFHLGQARTPPYLQLQVTEKQVLLRADDGAGEFSTSVTRPSVLCDGQWHRLAVMKSGNVLRLEVDAQSNHTVGPLLAAAAGAPAPLYLGGLPEPMAVQPWPPAYCGCMRRLAVNRSPPVAMTRSVEVHGAVGASGCPSPTRTQPTPAPGQAPAAASHRPLCSPHRCLFGL

SEQ ID NO: 802 - protein, 190 aa, Homo sapiens
  misc_feature (1)...(190): Xaa = any amino acid or symbol as shown in the table 8 as set forth in Example 2
DAWADAWAVVCPDSQEDSETRAQEDSGSEQPPDSVLPDKLKVSWENPSPQEAPAAXSAEPFQAPCSETSEAAPREGGKPPTPPPKILSEKLKASMGEMQASGPPAPGTVQVSVNGMDDSPEPAKPSQAEGTPGTPPKDATTSTALPPWDLPPPVPSPLLLPWGLAWGRPAASLAAQGTAISGPAGGEGGL

SEQ ID NO: 803 - protein, 73 aa, Homo sapiens
MGVVLYVMLCASLPFDDTDIPKMLWQQQKGVSFPTHLSISADCQDLLKRLLEPDMILRPSIEEVSWHPWLAST

SEQ ID NO: 804 - protein, 171 aa, Homo sapiens
MKSTSGEDAVNIIEMTTKDLEYYINSVDTAAPGFERTECNFERSSTGGTLQTLPRPLPLRHFRFRRRSHISGVLSSGAGASNPCPYCVCEEASKRGSHVQRGISEGLSGVEKRGGLLFFHLTLKRHAGSTESDTSEPVSTVWFGLDFHWYSGVLDKSLDLAFVICEVDRFQ

SEQ ID NO: 805 - protein, 182 aa, Homo sapiens; identical to SEQ ID NO: 786

SEQ ID NO: 806 - protein, 304 aa, Homo sapiens
AHASAEGDAEGEAEGPVGSTLGSYATLTRRPGRSALVRTSPSVTPTPARGTPRSQSFALRARRKGPPPPPPKRLSSVSGPSPEPPPLDGSPGPKEGATGPRRRTLSEPAGPSEPPGPPAPAGPASDTEEEEPGPEGTPPSRGSSGEGLPFAEEGNLTIKQRPKPAGPPPRETPVPPGLDFNLTESDTVKRRPKCREREPLQTALLAFGVASATPGPAAPLPSPTPGESPPASSLPQPEPSSLPAQGVPTPLAPSPAMQPPVPPCPGPGLESSAASRWNGETEPPAAPAALLKVPGAGTAPKPVS

SEQ ID NO: 807 - protein, 336 aa, Homo sapiens
MTKTHVIAASKEAFYTWQYRVAKKLTALEINQITRSRKEGRESRLAIIDISGVLTFFDLDARVTDSTGQQVVGELLKLERRDVWDMKWAKDNPDLFAMMEKTRMYVFRNLDPEEPIQTSGYICNFEDLEIKSVLLDEILKDPEHPNKDYLINFEIRSLRDSRALIEKVGIKDASQFIEDNPHPRLWRLLAEAALQKLDLYTAEQAFVRCKDYQGIKFVKRLGKLLSESMKQAEVVGYFGRFEEAERTYLEMDRRNTLELDCGLGRTGSVNFHTFLTLAKLFMALQQRHGIGSLSLAKESLLNVKDLLSIEPWHSEVYMVDPEEGVPELAIDKAAVA

SEQ ID NO: 808 - protein, 234 aa, Homo sapiens; identical to SEQ ID NO: 787
  misc_feature (1)...(234): Xaa = any amino acid or symbol as shown in the table 8 as set forth in Example 2

SEQ ID NO: 809 - protein, 1235 aa, Homo sapiens
FVPDCSVRTSESARRRDQRAQRSGRSPPTSAPSASRAGRRLEASEEVFKMKKFNFRKVLDGLTASSPGSGSSSGSNSGGGAGSGSVHPAGTAGVLREEIQETLTSEYFQICKTVRHGFPHQPTALAFDPVQKILAIGTRTGAIRILGRPGVDCYCQHESGAAVLQLQFLINEGALVSASSDDTLHLWNLRQKRPAILHSLKFNRERITYCHLPFQSKWLYVGTERGNTHIVNIESFILSGYVIMWNKAIELSTKTHPGPVVHLSDSPRDEGKLLIGYENGTVVFWDLKSKRAELRVYYDEAIHSIDWHHEGKQFMCSHSDGSLTLWNLKSPSRPFQTTIPHGKSQREGRKSESCKPILKVEYKTCKNSEPFIIFSGGLSYDKACRRPSLTIMHGKAITVLEMDHPIVEFLTLCETPYPNEFQEPYAVVVLLEKDLIVVDLTQSNFPIFENPYPMDIHESPVTCTAYFADCPPDLILVLYSIGVKHKKQGYSNKEWPISGGAWILGAQTYPEIIITGHADGSIKFWDASAITLQMLYKLKTSKVFEKQKVGEGKQTCEIVEEDPFAIQMIYWCPESRIFCVSGVSAYVIIYKFSRHEITTEIVSLEVRLQYDVEDIITPEPETSPPFPDLSAQLPSSRSLSGSTNTVASEGVTKDSIPCLNVKTRPVRMPPGYQAELVIQLVWVDGEPPQQITSLAVSSAYGIVAFGNCNGLAVVDFIQKTVLLSMGTIDLYRSSDLYQRQPRSPRKNKQFIADNFCMRGLSNFYPDLTKRIRTSYQSLTELNDSPVPLELERCKSPTSDHVNGHCTSPTSQSCSSGKRLSSADVSKVNRWGPGRPPFRKAQSAACMEISLPVTTEENRENSYNRSRSSSISSIDKDSKEAITALYFMDSFARKNDSTISPCLFVGTSLGMVLIISLNLPLADEQRFTEPVMVLPSGTFLSLKGAVLTFSCMDRMGGLMQPPYEVWRDPNNIDENEKSWRRKVVMNSSSASQEIGDHQYTIICSEKQAKVFSLPSQTCLYVHNITETSFILQANVVVMCSSACLACFCANGHIMIMSLPSLRPMLDVNYLPLTDMRIARTFCFTNEGQALYLVSPTEIQRLTYSQEMCDNLQDMLGDLFTPIETPEAQNRGFLKGLFGGSGQTFDREELFGEASAGKASRSLAQHIPGPGSIEGMKGAAGGVMGELTRARIALDERGQRLGELEEKTAGMMTSAEAFSKHAHELMLKYKDKKWYQF

SEQ ID NO: 810 - protein, 331 aa, Homo sapiens
MPSGWSGSPIDWLAWDNLEQPPLYPKKLVQTYSVFPNQDEMSDVVVQPYNSLLTLKRLTQNADCVEIKDYGPAKGGKKKDPNAPKRPPSGFFLFCSEFCPKSKSTNPGIPIGDVAKKLGEMWKNLNDSEKQPYITQAAKLKEKYEKDVAVYKSKGKSDGAKGPAKVAQKKVEEEDEDEEFCILHSAAELGGDLEPHPEKGLPEDDPDIVVKGWLYREPRGGGARPWLPPRRAWFVLTRDSLDQFSSSGKGARRLGSLVLTSLCSVTGPERRRKETGLWSVTVSGRKHSVRLCSPRQAEAERWGVALREVIASKAPLETPTQLLLRDIQPPE

SEQ ID NO: 811 - protein, 213 aa, Homo sapiens
SLRLAWHEGKLHFSVYDFDRFSRHDLIGQVVLDNLLELAEQPPDRPLWRDIVEGGSEKADLGELNFSLCYLPTAGRLTVTIIKASNLKAMDLTGFSDPYVKASLISEGRRLKKRKTSIKKNTLNPTYNEALVFDVAPESVENVGLSIAVVDYDCIGHNEVIGVCRVGPDAADPHGREHWAEMLANPRKPVEHWHQLVEEKTVTSFTKGSKGLS

SEQ ID NO: 812 - protein, 56 aa, Homo sapiens
REKEMDMSDPNFWTVLSNFTLPHLRSGNRLRRTQSCRTSNRKSLIGNGQSPALPRP

SEQ ID NO: 813 - protein, 111 aa, Homo sapiens
MSFGPYFYVCFIPILLYSLNTKGYGNPYPCFPSTPPKFPFGQPRERSQPQPQPLLPLPWFCRAVLACWEGLTRSVCSSRCLQGEGRKAKWGGRQPPQALWPQPAEGRRQPA

SEQ ID NO: 814 - protein, 125 aa, Homo sapiens; identical to SEQ ID NO: 789

SEQ ID NO: 815 - protein, 102 aa, Homo sapiens
SVRHLKYSLFKKSLLGSVSDNGIVTLWDVNSQSPYHNFDRVHKAPASGICFSPVNELLFVTIGLDKRIILYDTSSKKLVKTLVADTPLTAVDFMPDGATLAI

SEQ ID NO: 816 - protein, 178 aa, Homo sapiens
WESDVGEGLRPPPPPPPPGRRRTQEPRARDAATVIFACPAALLETLIAYGSSSPSFCKHRAARPLIFLLHRLTAEATARCPICALEARNPGRWGICASWPGMKTPFGKAAAGQRSRTGAGHGSVSVTMIKRKAAHKKHRSRPTSQPRGNIVGCIIQHGWKDGDEPLTQWKGTVLDQLL

SEQ ID NO: 817 - protein, 382 aa, Homo sapiens
TFTSGKTAVGKLAQPYKATLVSSAGASQVKWNKKNANCLATSHDGDVRIWDKRKPSTAVEYLAAHLSKIHGLDWHPDSEHILATSSQDNSVKIWDYRQPRKYLNILPCQVPVWKARYTPFSNGLVTVMVPQLRRENSLLLWNVFDLNTPVHTFVGHDDVVLEFQWRKQKEGSKDYQLVTWSRDQTLRMWPVDSQMQRLCANDILDGVDEFIESISLLPEPEKTLHTEDTDHQHTASHGEEEALKEDPPRNLLEERKSDQLGLPQTLQQEFSLINVQIRNVNVEMDAADRSCTVSVHCSNHRVKMLVKFPAQYPNNAAPSFQFINPTTITSTMKAKLLKILKDTALQKVKRGQSCLEPCLRQLVSCLESFVNQEDSASSNPFA

SEQ ID NO: 818 - protein, 132 aa, Homo sapiens
DLVCKISGFGRGPRDRSEAVYTTMSGRSPALWAAPETLQFGHFSSASDVWSFGIIMWEVMAFGERPYWDMSGQDVIKAVEDGFRLPPPRNCPNLMHRLMLDCWQKDPGERPRFSQIHSILSKMVQDPEPPNV

SEQ ID NO: 819 - protein, 764 aa, Homo sapiens
GPSGPKGYRGQKGAKGNMGEPGEPGQKGRQGDRGIEGPIGFPGPKGVPGFKGEKGEFGADGRKGAPGLAGKNGTDGQKGKLGRIGPPGCKGDPGNRGPDGYPGEAGSPGERGDQGGKGDPWPPGRRGPPGEIGAKGSKGYQGNNGAPGSPGVKGAKGGPGPRGPKGEPGRRGDPGTKGSPGSDGPKGEKGDPGPEGPRGLAGEVGNKGAKGDRGLPGPRGPQGALGEPGKQGSRGDPGDAGPRGDSGQPGPKGDPGRPGFSYPGPRGAPGEKGEPGPRGPEGGRGDFGLKGEPGRKGEKGEPADPGPPGEPGPRGPRGVPGPEGEPGPPGDPGLTECDVMTYVRETCGCCDCEKRCGALDVVFVIDSSESIGYTNFTLEKNFVINVVNRLGAIAKDPKSETGTRVGVVQYSHEGTFEAIQLDDERIDSLSSFKEAVKNLEWIAGGTWTPSALKFAYDRLIKESRRQKTRVFAVVITDGRHDPRDDDLNLRALCDRDVTVTAIGIGDMFHEKHESENLYSIACDKPQQVRNMTLFSDLVAEKFIDDMEDVLCPDPQIVCPDLPCQTELSVAQCTQRPVDIVFLLDGSERLGEQNFHKARRFVEQVARRLTLARRDDDPLNARVALLQFGGPGEQQVAFPLSHNLTAIHEALETTQYLNSFSHVGAGVVHAINAIVRSPRGGARRHAELSFVFLTDGVTGNDSLHESAHSMRKQNVVPTVLALGSDVDMDVLTTLSLGDRAAVFHEKDYDSLAQPGFFDRFIRWIC

SEQ ID NO: 820 - protein, 286 aa, Homo sapiens
PRVRELKEILDRKGHFSENETRWIIQSLASAIAYLHNNDIVHRDLKLENIMVKSSLIDDNNEINLNIKVTDFGLAVKKQSRSEAMLQATCGTPIYMAPEVISAHDYSQQCDIWSIGVVMYMLLRGEPPFLASSEEKLFELIRKGELHFENAVWNSISDCAKSVLKQLMKVDPAHRITAKELLDNQWLTGNKLSSVRPTNVLEMMKEWKNNPESVEENTTEEKNKPSTEEKLKSYQPWGNVPETNYTSDEEEEKQVGRIIAAFLPSVKYPHHTWNIFLQICLFVVSL

SEQ ID NO: 821 - protein, 334 aa, Homo sapiens
LQDSAREYSELLDKASETDDPYERMVLVAAFAVSGYCSTYFRAGSKPFNPVLGETYECIREDKGFRFFSEQVSHHPPISACHCESKNFVFWQDIRWKNKFWGKSMEILPVGTLNVMLPKYGDYYVWNKVTTCIHNILSGRRWIEHYGEVTIRNTKSSVCICKLTFVKVNYWNSNMNEVQGVVIDQEGKAVYRLFGKWHEGLYCGVAPSAKCIWRPGSMPTNYELYYGFTRFAIELNELDPVLKDLLPPTDARFRPDQRFLEEGNLEAAASEKQRVEELQRSRRRYMEENNLEHIPKFFKKVIDANQREAWVSNDTYWELRKDPGFSKVDSPVLW

SEQ ID NO: 822 - protein, 851 aa, Homo sapiens
  misc_feature (1)...(851): Xaa = any amino acid or symbol as shown in the table 8 as set forth in Example 2
VALTTSMCCNKQVIVIDKIKSASIADRCGALHVGDHILSIDGTSMEYCTLAEATQFLANTTDQVKLEILPHHQTRLALKGPDHVKIQRSDRQLTWDSWASNHSSLHTNHHYNTYHPDHCRVPALTFPKAPPPNSPPALVSSSFSPTSMSAYSLSSLNMGTLPRSLYSTSPRGTMMRRRLKKKDFKSSLSLASSTVGLAGQVVHTETTEVVLTADPVTGFGIQLQGSVFATETLSSPPLISYIEADSPAERCGVLQIGDRVMAINGIPTEDSTFEEASQLLRDSSITSKVTLEIEFDVAESVIPSSGTFHVKLPKKHNVELGITISSPSSRKPGDPLVISDIKKGSVAHRTGTLELGDKLLAIDNIRLDNCSMEDAVQILQQCEDLVKLKIRKDEDNSDEQESSGAIIYTVELKRYGGPLGITISGTEEPFDLXIISSLTKGGLAERTGAIHIGDRILAINSSSLKGKPLSEAIHLLQMAGETVTLKIKKQTDAQSASSPKKFPISSHLSDLGDVEEDSSPAQKPGKLSDMYPSHGCPSVDSAVDSWDGSAIDTSYGTEGTSFQASGYNFNTYDWRSPKQRGSLSPVTKPRSQTYPDVGLSYEDWDRSTASGFAGAADSAETEQEENFWSQALEDLETCGQSGILRELEATIMSGSTMSLNHEAPTPRSPAGSDRPSFQERSSSRPHYSQTTRSNTLPSDVGRKSVTLRKMKQEIKEIMSPTPVELHKVTLYKDSDMEDFGFSVADGLLEKGVYVKNIRPAGPGDLGGLKPYDRLLQVNHVRTRDFDCCLVVPLIAESGNKLDLVISRNPLASQKSIDQQSLPGDXSEQNSAFFQQPSHGGNLETREPTNTL

SEQ ID NO: 823 - protein, 214 aa, Homo sapiens; identical to SEQ ID NO: 798

SEQ ID NO: 824 - protein, 240 aa, Homo sapiens
EEGEERQGEGEEEEDGEELRRGLLRPAGVGGRMASVSSATFSGHGARSLLQFLRLVGQLKRVPRTGWVYRNVQRPESVSDHMYRMAVMAMVIKDDRLNKDRCVRLALVHDMAECIVGDIAPADNIPKEEKHRREEEAMKQITQLLPEDLRKELYELWEEVYMEYETQSSAEAKFVKQLDQCEMILQASEYEDLEHKPGRLQDFYDSTAGKFNHPEIVQLVSELEAERSTNIAAAASEPHS

SEQ ID NO: 825 - protein, 151 aa, Homo sapiens
SVKRQPGFGQTTAKRHPSQGQQAVVKAALSILLNKAVLHGCPLPRAELDQHTADFKGGSFPLSIVSSYNTCNKKKGESGAWRKVNNSPRRKSGRFSLPTWNKPDLSTEGMKNKTISQLNCNRNASLSKQKSLENDLSLTLNLDQRLSLGSD

SEQ ID NO: 826 - protein, 137 aa, Homo sapiens
GSGLYRGPTPGGQCIWKPNSMPPDHERNFGFTQFALELNELTAELKRSLPSTDTRLRPDQRYLEEGNIQAAEAQKRRIEQLQRDRRKVMEENNIVHQARFFRRQTDSSGKEWWVTNNTYWRLRAEPGYGNMDGAVLW

SEQ ID NO: 827 - protein, 225 aa, Homo sapiens
RFVEDRIPYQDRESYSQPAWHHRGPPQRDWKWEKDGFNNTRKNSFPHSLRNGGGPRGRSGWHKGVAGGSSTWFHNHSNSGGGWLSNSGAVDWNHNGTGRNSSWLSEGTGGFSSWHMNNSNGNWKSSVRSTNNWNYSGPGDKFQPGRNRNSNCQMEDMTMLWNKKSNKSNKYSHDRYNWQRQENDKLGTVATYRGPSEGFTSDKFPSEGLLDFNFEQLESQTTKQA

SEQ ID NO: 828 - protein, 174 aa, Homo sapiens
RGGVSDMLIKVQATEQMGYCPIQCEKLCYLPGNSKCSSVYENCLEQSRAIGNVHPRGVQSQRDTSLLKHTCRVDLFDDPCYINTQALQSTPGSAGNQGQPNHWGAHGTAERHLETVQPGATAQPASSHSLPHIKQQLWSEECYHGKLSRKAAESLLVKDGDFLVRESATSPGQN

SEQ ID NO: 829 - protein, 165 aa, Homo sapiens
RVVEFEAFNMDSAYSEQAAVLLQRSRPSRGGTSAWGKCSLPKFTVPKGRLGVTRIGDLSLQDMRKVPSLALIELTALCDILGLDLKRSKAGKWKAAETRLFGVPLDSLLEADHKVLPSTQVPLVLQALLSCLEKRGLDMEGILRVPGSQARVKVHPEAADTFAHG

SEQ ID NO: 830 - protein, 76 aa, Homo sapiens
HEQDKNKYNTPKYRMIVRVTNRDIICQIAYARIEGDMIVCATYAHELPKYGVKVGLTYYACTYSTVVLVARTLLDT

SEQ ID NO: 831 - protein, 164 aa, Homo sapiens
WRGLMVMSAIEKLLRQVDWGQLDYLVVDMPPGTGDVQLSVSQNIPITGAVIVSTPQDIALMDAHKGAEMFRRVHVPVLGLVQNMSVFQCPKCKHKTHIFGADGARKLAQTLGLEVLGDIPLHLNIREASDTGQPIVFSQPESDEAKAYLRIAVEVVRRLPSPSE

SEQ ID NO: 832 - protein, 115 aa, Homo sapiens
GLSRAAMVWWQQAQPSLEMQNDAGEFVDLYVPRKCSASNRIIGAKDHASIQMNVARLTRSQAGLMASLKLMLSAGPFVGWVSQMIPFSDWPRRWHRLKELLTGENHRCGIFVINK

SEQ ID NO: 833 - protein, 293 aa, Homo sapiens
GTRNGQFEPRRGRAWEGSAGGLRAPGAAAGGPGVQPRGSGLPGNAIRAGVNPGRGPASPFWDLSLPWDLWPPPTDHAPGAPDFPAVEGRPWAGGRPPWPVSGVLGSRVCGPLYSTSPAGPGSGGLSPSQGGPAGAGGDAGLPGRCPSAPWRAGSRPAASCPDWIPGPQGLWLHRNPTSGPPSQIGEGAEQGDEGVADAPQIQCKNGAEDPPAEDEPPQVPEAGEEDAVPAEEGPGGTPETQADQVRERPEAHLAEGGAKGSPRRLADPQDLPAGQMSLAPPFPPVAAVIRSNK

SEQ ID NO: 834 - protein, 293 aa, Homo sapiens; identical to SEQ ID NO: 833

SEQ ID NO: 835 - protein, 293 aa, Homo sapiens; identical to SEQ ID NO: 833

SEQ ID NO: 836 - protein, 175 aa, Homo sapiens
MGWVWTLCTASACLTLLFWSQTPGKAFQIPCPPPHLSHWCLSPMQMDDGCARLCVLWTAWMRWRVLMCSCRVWATDLGIFLGVALGNEPLEMWPLTQNEECTVTGFLRDKLQYRSRLQYMKHYFPINYKIRVPYEGVFRIANVTRLRAQGSERELRYLGVLVSLSATESVHDELL

SEQ ID NO: 837 - protein, 175 aa, Homo sapiens; identical to SEQ ID NO: 836

SEQ ID NO: 838 - protein, 556 aa, Homo sapiens
PCGRVPAPLPPGRAPITGTRWPPLGTQPDLGSALYQENYKQMKALVNQLHERVEHIKLGGGEKARALHISRGKLLPRERIDNLIDPGSPFLELSQFAGYQLYDNEEVPGGGIITGIGRVSGVECMIIANDATVKGGAYYPVTVKKQLRAQEIAMQNRLPCIYLVDSGGAYLPRQADVFPDRDHFGRTFYNQAIMSSKNIAQIAVVMGSCTAGGAYVPAMADENIIVRKQGTIFLAGPPLVKAATGEEVSAEDLGGADLHCRKSGVSDHWALDDHHALHLTRKVVRNLNYQKKLDVTIEPSEEPLFPADELYGIVGANLKRSFDVREVIARIVDGSRFTEFKAFYGDTLVTGFARIFGYPVGIVGNNGVLFSESAKKGTHFVQLCCQRNIPLLFLQNITGFMVGREYEAEGIAKDGAKMVAAVACAQVPKITLIIGGSYGAGNYGMCGRAYSPRFLYIWPNARISVMGGEQAANVLATITKDQRAREGKQFSSADEAALKEPIIKKFEEEGNPYYSSARVWDDGIIDPADTRLVLGLSFSAALNAPIEKTDFGIFRM

SEQ ID NO: 839 - protein, 110 aa, Homo sapiens
RRSLLRPPPQALPMMAPSHHPSPAPLPASPPPPAPPPPLAPPRDPLALRAPPVPQAPRAPPAPRALQAPPAPRARPPARGRRGGTAPGPRWPRPGARVPGARGQAPGSRP

SEQ ID NO: 840 - protein, 359 aa, Homo sapiens
FVTDFPARSMAATSLMSALAARLLQPAHSCSLRLRPFHLAAVRNEAVVISGRKLAQQIKQEVRQEVEEWVASGNKRPHLSVILVGENPASHSYVLNKTRAAAVVGINSETIMKPASISEEELLNLINKLNNDDNVDGLLVQLPLPEHIDERRICNAVSPDKDVDGFHVINVGRMCLDQYSMLPATPWGVWEIIKRTGIPTLGKNVVVAGRSKNVGMPIAMLLHTDGAHERPGGDATVTISHRYTPKEQLKKHTILADIVISAAGIPNLITADMIKEGAAVIDVGINRVHDPVTAKPKLVGDVDFEGVRQKAGYITPVPGGVGPMTVAMLMKNTIIAAKKVLRLEEREVLKSKELGVATN

SEQ ID NO: 841 - protein, 398 aa, Homo sapiens
  misc_feature (1)...(398): Xaa = any amino acid or symbol as shown in the table 8 as set forth in Example 2
MAWPCISRLCCLARRWNQLDRSDVAVPLTLHGYSDLDSEEPGTGGAASRRGQPPAGARDSGRDVPLTQYQRDFGLWTTPAGPKDPPPGRGPGAGGRRGKSSAQSSAPPAPGARGVYVLPIGDADAAAAVTTSYRYGLGRDRNESPPCGGRTRRPGARGMGWAAERRRLEPGSHATSELPAASEVTPVWSVGTAGGAFAAPCPETVLEHPRAGSAPLPSQPPSWGQPSEWPAFSRVGTGLPLTPTAGPSRARGARRPCPPALPGHCLLDRTYTGLQTLGAETLLAVVNSAAMNVGVQVVDVELHRHSLGEDCIYPQSSESDISDAPPSLPLTIPAPVKASSPIKQSHEPVPDTSVEKGSPGSCPFHLXGPLSHLGSSPGFLLWRPPGLLSSVALVASCS

SEQ ID NO: 842 - protein, 925 aa, Homo sapiens
MHVERRVCHAVSKYNVTLSCVAGGLAAKSSGLELIWLCDLLVRELGQLTGPVCKVRTPALIYGRHHQPPLPRPLPTLTCAASRWPQPEEATAPPGEGGQKDRALLPGIPAGPKDQCQNRRKISSRTATRPEPEPPQDRSQNRRKTSARTAEPQGLSLPEDDDPAPLSCRLGCLLTHCLPSWVPCCPPESTTLDVVEVESYDPYTDSWTPVSPALKYVSNFSAAGCRGRLYLVGSSACKYNALALQCYNPVTDAWSVIASPFLPKYLSSPRCAALHGELYLIGDNTKKVYVYDPGANLWQKVQSQHSLHENGALVPLGDALYVTGGRWQGMEGDYHVEMEAYDTVRDTWTRHGALPRLWLYHGASTVFLDVSNKKTEGYRPLLQLVGPSVDPAESMCMDGECANGLRREGTATYTGKMLHLRGRVIHRPSPVPGVVSADRSEVWLLLPDSAAPGTWQGSQSLLPHPVNQDRVRPPFPSGLFSKEFPGNSSPRCECKGFGAWTAEQRVVRLGRLLGTAAPIFPPQHPGLRIGQPAPKRRPCIPPDQPGTKGSDLAAGFVSDKRAQSALKSQGPSLAALPGAQIAQGLSQEGPSQNCAQCQHQSGCSADRNGNFRKHHCPCFGLPGPPGPPGPQGPPGPIIPPEALLKEFQLLLKGAVRQRERAEPEPCTCGPAGPVAASLAPVSATAGEDDDDVAAFLCRLRRDALVERRALHELGVYYLPDAEGAFRRGPGLNLTSGQYRAPVAGFYALAATLHVALGEPPRRGPPRPRDHLRLLICIQSRCQRNACRQAPEERPRPLGGSPGLSQHGEHGSRGSVCMREVLRPCRAGTRWRKSLALQKLGSHPLHTHYQGRGRKHQGSHLLSSEREVTAKNLNYECRSRTGGKGRLRLILLFVQPVEVAGLPVPGRYLQGSSVPWNLGDTFKSKY

SEQ ID NO: 843 - protein, 336 aa, Homo sapiens
PDGHLALMSQPREVREFNGDHFLLERAIRADFALVKGWKADRAGNVVFRRSARNFNVPMCKAADVTAVEVGAFPPEDIHVPNIYVGRVIKGQKYEKRIERLTIRKEEDGDAGKEEDARTRIIRRAALEFEDGMYANLGIGIPLLASNFISPSMTVHLHSENGILGLGPFPTEDEVDADLINAGKQTVTVLPGGCFFASDDSFAMIRGGHIQLTMLGAMQVSKYGDLANWMIPGKKVKGMGGAMDLVSSQKTRVVVTMQHCTKDNTPKIMEKCTMPLTGKRCVDRIITEKPVFDVHRKKELTLRELWEGLRVDDIKKSTGCAFAVSPNLRPMQQVAP

SEQ ID NO: 844 - protein, 50 aa, Homo sapiens
MSRFLLPREGCLLIVFMLCEKTLPFLFTLKEYTFIPEHRTTDINCVNTHE

SEQ ID NO: 845 - protein, 123 aa, Homo sapiens
MSPGIIQQLLSCSCHLPKDQQAKLPPTTLEKYGYSTGAVTLLTLGSMLGTALVLFHSCEENYRLILQLFVGLAVGTLSGDALLHLIPQVLGLHKQEAPEFGHFHESKGHIWKLMGLIGGIHGF

SEQ ID NO: 846 - protein, 145 aa, Homo sapiens
  misc_feature (1)...(145): Xaa = any amino acid or symbol as shown in the table 8 as set forth in Example 2
KAQGLTKKVKSEKQPVKRLPAKFLQLWXEKQKRSSSSQDKDKDSRCTRQHCTEEDEEEDEEEEEESFMTSREMIPERNKQEKESDDASTVNEETSEENNEMEESDVSQDXERFTTFWKVVKTKALKVSGSSDCRETEELVGSNSQ

SEQ ID NO: 847 - protein, 128 aa, Homo sapiens
GGGIDSDASLVIAGVRLEDEGRYRCELINGIEDESVALTLSLEGEALPLPPHSCVAAGPPRLGLPGLLPSISSAPLGTPAPSPRPRRPSSPSAPIRWPSPGSPPPPRCGVSVPTQPGPVPVQLLRGVY

SEQ ID NO: 848 - protein, 71 aa, Homo sapiens
  misc_feature (1)...(71): Xaa = any amino acid or symbol as shown in the table 8 as set forth in Example 2
QDSALLQLHGLXSLVDKLSPPGQRRLDLFSCLLRHRLKLSTSEGVRIQSALQAFNAKLPNTMDYDTTKLCS

SEQ ID NO: 849 - protein, 160 aa, Homo sapiens
  misc_feature (1)...(160): Xaa = any amino acid or symbol as shown in the table 8 as set forth in Example 2
TAARCQGGPTHVPAFVGTACPTRIPGHAPARQCREYYYXYYYDFWKEPRRCHALLLPPWAGLEVGMPPSHTQLGMHPAPPPPHLEVKAQGPSNRQRTDGCRWCSGRASALGGGRQDSRLRERGGGYDHHCPICRSLKIQLKCHPASGPQTVGLGRLASVS

SEQ ID NO: 850 - protein, 111 aa, Homo sapiens
MQATSNLLNLLLLSLFAGLNPSKTHINPKEGWQVYSSAQDPDGRGICTVVAPEQNLCSRDAKSRQLRQLLEKVQNMSQSIEVLNLRTQRDFQYVLKMETQMKGLKAKFRQI

SEQ ID NO: 851 - protein, 111 aa, Homo sapiens; identical to SEQ ID NO: 850

SEQ ID NO: 852 - protein, 250 aa, Homo sapiens
QSQLCAGNSGPALGVGGPGCPKSAETHARSSPVATGSRVGGRRAPCGPGMTSQRSPLAPLLLLSLHGVAASLEVSESPGSIQVARGQTSSLACTFTTSAALINLNVIWMVTPLSNANQPEQVILYQGGQMFDGAPRFHGRVGFTGTMPATNVSIFINNTQLSDTGTYQCLVNNLPDIGGRNIGVTGLTVLVPPSAPHCQIQGSQDIGSDVILLCSSEEGIPRPTYLWEKLDNTLKLPPTATQDLGDDLEQ

SEQ ID NO: 853 - protein, 82 aa, Homo sapiens
IEDDGEIISDVLKIPVQLVFKNKIKLYWSKVKAEPSEKVSLRISVTQPDSIVGIVAVDKSVNLMNASNDITMENVSLAIFSL

SEQ ID NO: 854 - protein, 213 aa, Homo sapiens
VVAVEYALSNYLFAAVGNPKDLFEVCLMAQDLDTAASYLIILQNMEVPAVSRQHATLLFNTALEQGKWDLCRHMIRFLKAIGSGESETPPSTPTAQEPSSSGGFEFFRNRSISLSQSAENVPASKFSLQKTLSMPSGPSGKRWSKDSDCAENMYIDMMLWRHARRLLEDVRLKDLGCFAAQLGFELISWLCKERTRAARVDNFVIALKRLHKD

SEQ ID NO: 855 - protein, 441 aa, Homo sapiens
RTRMFLEEKIPSISDLKLAIRRATLKRSFTPVFLGSALKNKGVQPLLDAVLEYLPNPSEVQNYAILNKEDDSKEKTKILMNSSRDNSHPFVGLAFKLEVGRFGQLTYVRSYQGELKKGDTIYNTRTRKKVRLQRLARMHADMMEDVEEVYAGDICALFGIDCASGDTFTDKANSGLSMESIHVPDPVISIAMKPSNKNDLEKFSKGIGRFTREDPTFKVYFDTERQRDSYIWNGRITPEIYAQRLEREYGCPCITGKTKSCRFERPLLPLSRLTLHIKNNQVVQASMGKVIGVLEPLDPEGLPKLEFSDETFGSNIPKQFVPAVEKGFLDACEKGPLSGHKLSGLRFVLQDGAHHMVDSNEISFIRAGEGALKQALANATLCILEPIMAVEVVAPNEFQGTSILAGINRRHGVITGQDGVEDYFTLYADVSSLGHWQSCFY

SEQ ID NO: 856 - protein, 184 aa, Homo sapiens
  misc_feature (1)...(184): Xaa = any amino acid or symbol as shown in the table 8 as set forth in Example 2
PQSPQTDQTAQGQQALAPPAGRSGQXGRPGRRARLGPGERHSXAPPPLSQLLLQTFPHLQALPSAHARPSGQPHADRGHSRSPSGTSAPALSAGAXAPARGPEQARCPQAGRVCHCPRGGRRGPESSGXRPEAPQASPEKGPLGFGPVPRTARTRAQASSRCQVAPRPEALCCPPPKGGRHPSQ

SEQ ID NO: 857 - protein, 172 aa, Homo sapiens
  misc_feature (1)...(172): Xaa = any amino acid or symbol as shown in the table 8 as set forth in Example 2
WHWPTSTNPRGQHLXCSASXPLLCGSTMTDGATGCTRAPSAQPSSSSRQSGYRRXRRRRACTQTRASTPSRXAPASASGRWPXCYASSLRTGTTLTSTASTTVPWLCPLFCCCPSKQPAPPFPASQQQHMESWRRQATPSRAATRALPSAKGHTGRLLTAAIYEGRPKPGQV

SEQ ID NO: 858 - protein, 158 aa, Homo sapiens
FVQHCPSLPLSTVLGASWALPWASGSHPPSRLPCRMPQLSLSWLGLGPVAASPWLLLLLVGGSWLLARVLAWTYTFYDNCRRLQCFPQPPKQNWFWGHQGLVTPTEEGMKTLTQLVTTYPQGFKLWLGPTFPLLILCHPDIIRPITSASAAVAPKDMI

SEQ ID NO: 859 - protein, 249 aa, Homo sapiens
  misc_feature (1)...(249): Xaa = any amino acid or symbol as shown in the table 8 as set forth in Example 2
ASFLLQMCPXGPVQSLSSEPXGSGGFCLPLKSAQGTXTPQDTCRQGHPGIPGNPGHNGLPGRDGRDGAKGDKGDAGEPGRPGSPGKDGTSGEKGERGADGKVEAKGIKGDQGSXGSPGKHGPKGLAGPMGEKGLRGETGPQGQKGNKGDVGPTGPEGPRGNIGPLGPTGLPGPMGPIGKPGPKGEAGPTGPQGEPGVRGIRGWKGDRGEKGKIGETLVLPKSAFTVGLTVLSKFPSSDVPIKFDKIHIT

SEQ ID NO: 860 - protein, 249 aa, Homo sapiens; identical to SEQ ID NO: 859
  misc_feature (1)...(249): Xaa = any amino acid or symbol as shown in the table 8 as set forth in Example 2

SEQ ID NO: 861 - protein, 249 aa, Homo sapiens; identical to SEQ ID NO: 859
  misc_feature (1)...(249): Xaa = any amino acid or symbol as shown in the table 8 as set forth in Example 2

SEQ ID NO: 862 - protein, 249 aa, Homo sapiens; identical to SEQ ID NO: 859
  misc_feature (1)...(249): Xaa = any amino acid or symbol as shown in the table 8 as set forth in Example 2

SEQ ID NO: 863 - protein, 131 aa, Homo sapiens
SFKYPTGIFTRFFLLPNSIIKAGFGTKGFFLEDKKTKIASTKICNNKILWLICSEFMSLWAGSNKKNMNQSRMDVYMSHAPTGSSVHNILHIKQLYHSDEFRAYDWGNDADNMKHYNQSHPPIYDLTAMKV

SEQ ID NO: 864 - protein, 564 aa, Homo sapiens
  misc_feature (1)...(564): Xaa = any amino acid or symbol as shown in the table 8 as set forth in Example 2
FRGEAERMALXQPGRSPRVPTPRPGRWARRDGVHSLPSQFEPERRGRGRRDSEPGTRGRPGRHAESTNLLXGRMENEESDVKPPDWPNPMNATSQSPQPQHFDSFGLRLPRDITELPEWSEGYPFYMAMGFPGYDLSADDIAGKFQFSRGMRRTYDAGFKLMVVEYAESTNNCQAAKQFGVLEKNVRDWRKVKPQLQNAHAMRRAFRGPKNGRFALVDQRVAEYVRYMQAKGDPITREAMQLKALEIAQEMNIPEKGFKASLGWCRRMMRRYDLSLRHKVPVPQHLPEDLTEKLVTYQRSVLALRRAHDYEVAQMGNADETPICLEVPSRVTVDNQGEKPVLVKTPGREKLKITALLGVLADGRKLPPYIILRGTYIPPGKFPSGMEIRCHRYGWMTEDLMQDWLEVVWRRRTGAVPKQRGMLILNGFRGHATDSVKNSMESMNTDMVIIPGGLTSQLQVLDVVVYKPLNDSVRAQYSNWLLAGNLALSPTGNAKKPPLGLFLEWVMVAWNSISSESIVQGFKKCHISSNLEEEDDVLWEIESELPGGGEPPKDCDTESMAESN

SEQ ID NO: 865 - protein, 122 aa, Homo sapiens
MTWLVLLGTLLCMLRVGLGTPDSEGFPPRALHNCPYKCICAADLLSCTGLGLQDVPAELPAGTADLDLSHNALQRMRPGWLAPLFQLRALHLDHNELHALDRGVFVNASGLRLLDLSSNAEF

SEQ ID NO: 866 - protein, 54 aa, Homo sapiens
MKSLVLLLCLAQLWGCHSAPHGPGLIYRQPNCDDPETEEYKEARLVLDSVKLEA

SEQ ID NO: 867 - protein, 54 aa, Homo sapiens; identical to SEQ ID NO: 866

SEQ ID NO: 868 - protein, 54 aa, Homo sapiens; identical to SEQ ID NO: 866

SEQ ID NO: 869 - protein, 628 aa, Homo sapiens
  misc_feature (1)...(628): Xaa = any amino acid or symbol as shown in the table 8 as set forth in Example 2
GWGTSGSMSGCGLFLRTTAAARACRGLVVSTANRRLLRTSPPVRAFAKELFLGKIKKKEVFPFPEVSQDELNEINQFLGPVEKFFTEEVDSRKIDQEGKIPDETLEKLKSLGLFGLQVPEEYGGLGFSNTMYSRLGETISMDGSITVTLAAHQAIGLKGIILAGTEEQKAKYLPKLASGEALAAFCLTEPANGSDAAXIRSRATLSEDKKHYILNGSKVWITNGGLANIFTVFAKTEVVDSDGSVKDKITAFIVERDFGGVTNGKPEDKLGIRGSNTCEVHFENTKIPVENILGEVGDGFKVAMNILNSGRFSMGSVVAGLLKRLIEMTAEYACTRKQFNKRLSEFGLIQEKFALMAQKAYVMESMTYLTAGMLDQPGFPDCSIEAAMVKVFSSEAAWQCVSEALQILGGLGYTRDYPYERILRDTRILLIFEGTNEILRMYIALTGLQHAGRILTTRIHELKQAKVSTVMDTVGRRLRDSLGRTVDLGLTGNHGVVHPSLADSANKFEENTYCFGRTVETLLLRFGKTIMEEQLVLKRVANILINLYGMTAVLSRASRSIRIGLRNHDHEVLLANTFCVEAYLQNLFSLSQLDKYAPENLDEQIKKVSQQILEKRAYICAHPLDRTC

SEQ ID NO: 870 - protein, 456 aa, Homo sapiens
ADPHTTVIRFFPAASATKRVLPPVLRVSSPRTWNPNVPESPRIPAPRLPKRMSGAPTAGAALMLCAATAVLLSAQGGPVQSKSPRFASWDEMNVLAHGLLQLGQGCANTGAHPQSAERAGARLSACGSACQGTEGSTDLPLAPESRVDPEVLHSLQTQLKAQNSRIQQLFHKVAQQQRHLEKQHLRIQHLQSQFGLLDHKHLDHEVAKPARRKRLPEMAQPVDPAHNVSRLHRLPRDCQELFQVGERQSGLFEIQPQGSPPFLVNCKMTSDGGWTVIQRRHDGSVDFNRPWEAYKAGFGDPHGEFWLGLEKVHSITGDRNSRLAVQLRDWDGNAELLQFSVHLGGEDTAYSLQLTAPVAGQLGATTVPPSGLSVPFSTWDQDHDLRRDKNCAKSLSGGWWFGTCSHSNLNGQYFRSIPQQRQKLKKGIFWKTWRGRYYPLQATTMLIQPMAAEAAS

SEQ ID NO: 871 - protein, 375 aa, Homo sapiens
  misc_feature (1)...(375): Xaa = any amino acid or symbol as shown in the table 8 as set forth in Example 2
TARTGSELPGRATRPMVRMVPVLLSLLLLLGPAVPQENQDGRYSLTYIYTGLSKHVEDVPAFQALGSLNDLQFFRYNSTDRKSQPMGLWRQVGREWEDWEARTSQLSGRPGGGTFFYGRPWKDIVGVIYQRQXTGSSRICRGRFGCEIEINRSSGISWEFYYDGKDYIEFNKEIPAWVSPFDPAAQITKQKWEAEPVYVQRAKAYLEEECPATLRKYLKYSKNILDRQDPPSVVVTSHQGPREKKRRNLKCLGLTTFYPRGKFDVHWDFGAGRGCREPXVYGGDVLHNGKWAFYPVPGVVVVQCPPAGTQPPLLPATCSTASPGPAPSWCPWGGQARKQGLEAMWDLQTQLACPFLALMLGSXTHRNHSQWVHKA

SEQ ID NO: 872 - protein, 108 aa, Homo sapiens
MLWFSGVGALAERYCRRSPGITCCVLLLLNCSGVPMSLASSFLTGSVAKCENEGEVLQIPFITDNPCIMCVCLNKEVTCKREKCPVLSRDCALAIKQRGACCEQCKGC

SEQ ID NO: 873 - protein, 183 aa, Homo sapiens
SPGPALFSQPLGSCSAKAFPAMRPVSVWQWSPWGLLLCLLCSSCLGSPSPSTGPEKKAGSQGLRFRLAGFPRKPYEGRVEIQRAGEWGTICDDDFTLQAAHILCRELGFTEATGWTHSAKYGPGTGRIWLDNLSCSGTEQSVTECASRGWGNSDCTHDEDAGVICKDQRLPGFSDSNVIEVEH

SEQ ID NO: 874 - protein, 178 aa, Homo sapiens
  misc_feature (1)...(178): Xaa = any amino acid or symbol as shown in the table 8 as set forth in Example 2
LLYAQAGVQXLNLSSLQPQPAGLKQSSHPSLPSSWDYRYSTPHPANFFVEMEFHHVAQAGLELLGSGDLPTSTSHSAGITGVSHHAPPRLISSEGSLLGHLLCLPMVFPLLCVFVLISSSLAGEEAAGLRVQKLWPAVVLSHLPVCWFHCSGIWSEVIELKVGREGHVLPWQAHVVEF

SEQ ID NO: 875 - protein, 210 aa, Homo sapiens
TRYATPLAPGPGHPFSCSRRMATHHTLWMGLALLGVLGDLQAAPEAQVSVQPNFQQDKFLGRWFSAGLASNSSWLREKKAALSMCKSVVAPATDGGLNLTSTFLRKNQCETRTMLLQPAGSLGSYSYRSPHWGSTYSVSVVETDYDQYALLYSQGSKGPGEDFRMATLYSRTQTPRAELKEKFTAFCKAQGFTEDTIVFLPQTDKCMTEQ

SEQ ID NO: 876 - protein, 540 aa, Homo sapiens
WDFIPDNSKAAFQASTRVYFELDLTDPYTISALASCQLLPHGENLQDVLPHELYWRLKRHLDYVKLMMPSWMTPAQRGKGLYADYLFNAIAGNWERKRPVWVMLMVNSLTERDVRFRGVPVLDLYLAQQAEKMKKTTGAVEQVEEQCHPLNNGLNFSQVLFALNQTLLQQESVRAGSLQASYTTEDLIKHYNCGDLSAVIFNHDTSQLPNFINTTLPPHEQVTAQEIDSYFRQELIYKRNERMGKRVMALLRENEDKICFFAFGAGHFLGNNTVHSTFLAGRQGLGGGPPHPPGRPIHSPAPQSPAPSPEGTSTSPAPVTPAAAVPEAPSVTPTAPPEDEDPALSPHLLLPDSLSQLEEFGRQRKWHKRQSTHQRPRQFNDLWVRIEDRARQRGSVWTLELSQAGCVALGCPVCLLKLLVPFSIVLGKIDLKKSDLSPKASAQDEAADGDSAMCFLLSSTTASPPPLPLQPTHSSGTAKPPFQLSDPATTAGPRQGPPAARHPPWAFSPPSPPTHRCLLPACIALGPPDLGPPQVEKPEK

SEQ ID NO: 877 - protein, 788 aa, Homo sapiens
QRNLFLKAFTDFLAFMVLFNYIIPVSMYVTVEMQKFLGSYFITWDEDMFDEETGEGPLVNTSDLNEELGQVEYIFTDKTGTLTENNMEFKECCIEGHVYVPHVICNGQVLPESSGIDMIDSSPSVNGREREELFFRALCLCHTVQVKDDDSVDGPRKSPDGGKSCVYISSSPDEVALVEGVQRLGFTYLRLKDNYMEILNRENHIERFELLEILSFDSVRRRMSVIVKSATGEIYLFCKGADSSIFPRVIEGKVDQIRARVERNAVEGLRTLCVAYKRLIQEEYEGICKLLQAAKVALQDREKKLAEAYEQIEKDLTLLGATAVEDRLQEKAADTIEALQKAGIKVWVLTGDKMETAAATCYACKLFRRNTQLLELTTKRIEEQSLHDVLFELSKTVLRHSGSLTRDNLSGLSADMQDYGLIIDGAALSLIMKPREDGSSGNYRELFLEICRSCSAVLCCRMAPLQKAQIVKLIKFSKEHPITLAIGDGANDVSMILEAHVGIGVIGKEGRQAARNSDYAIPKFKHLKKMLLVHGHFYYIRISELVQYFFYKNVCFIFPQFLYQFFCGFSQQTLYDTAYLTLYNISFTSLPILLYSLMEQHVGIDVLKRDPTLYRDVAKNALLRWRVFIYWTLLGLFDALVFFFGAYFVFENTTVTSNGQIFGNWTFGTLVFTVMVFTVTLKLALDTHYWTWINHFVIWGSLLFYVVFSLLWGGVIWPFLNYQRMYYVFIQMLSSGPAWLAIVLLVTISLLPDVLKKVLCRQLWPTATERVQVRSVPSRGGGASGPWP

SEQ ID NO: 878 - protein, 217 aa, Homo sapiens
  misc_feature (1)...(217): Xaa = any amino acid or symbol as shown in the table 8 as set forth in Example 2
HLDRSGLFNIQVIPVCRKLGKEGNDEKQCVTTSRSNAAFFLLHFFLLATFTWMGLEAIHMYIALVKVFNTYIRRYILKFCIIGWGKPLKIFLVLFFPHENCQVYGKESYGKEKGDELXVIKTFCDEXISFVSXSGVMFFLNIAMFIVVMVQICGRNGKRSNRTLREEVLRNLRSVVSLTFLLGMTWGFAFFAWGPLNIPFMYLFSIFNSLQGKINCT

SEQ ID NO: 879 - protein, 123 aa, Homo sapiens
QMIDSQNSKETKSHKALSDLELVAQSIIIIFAAYDTTSTTLPFIMYELATHPDVQQKLQEEIDAVLANKAPVTYDALVQMEYLDMVVNETLRLFPVVSRVTRVCKKDIEINGVFIPKGLAVMV

SEQ ID NO: 880 - protein, 256 aa, Homo sapiens
MKRERGALSRASRALRLAPFVYLLLIQTDPLEGVNITSPVRLIHGTVGKSALLSVQYSSTSSDRPVVKWQLKRDKPVTVVQSIGTEVIGTLRPDYRDRIRLFENGSLLLSDLQLADEGTYEVEISITDDTFTGEKTINLTVDVPISRPQVLGASTTVLELSEAFTLNCSHENGTKPSYTWLKDGKPLLNDSRMLLSPDQKVLTITRVLMEDDDLYSCVVENPINQGRTLPCKITEYRKSSLSSIWLQEAFSSLGPW

SEQ ID NO: 881 - protein, 1251 aa, Homo sapiens
RLRLLLLESVSGLLQPRTGSAVAPVHPPNRSAPHLPGLMCLLRLHGSVGGAQNLSALGALVSLSNARLSSIKTRFEGLCLLSLLVGESPTELFQQHCVSWLRSIQQVLQTQDPPATMELAVAVLRDLLRYAAQLPALFRDISMNHLPGLLTSLLGLRPECEQSALEGMKACMTYFPRACGSLKGKLASFFLSRVDALSPQLQQLACECYSRLPSLGAGFSQGLKHTESWEQELHSLLASLHTLLGALYEGAETAPVQNEGPGVEMLLSSEDGDAHVLLQLRQRFSGLARCLGLMLSSEFGAPVSVPVQEILDFICRTLSVSSKNIVSGICHLFRALAQDTRQPGKYWGPESPQTVSSWSPSQRASTFVQITSLPMCRDTGAQCQSVANASLGEGEFGDSAESLLRGPAILLTFHPGSILEDRGLILLGEMRSGVGFLTYVYICKWSFPVSVSLWLSLSSSTLYLCPFFLQSLHGDGPCGCCCCPLSTLKALDLLSALILACGSRLLRFGILIGRLLPQVLNSWSIGRDSLSPGQERPYSTVRTKVYAILELWVQVCGASAGMLQGGASGEALLTHLLSDISPPADALKLRSPRGSPDGSLQTGKPSAPKKLKLDVGEAMAPPSHRKGDSNANSDVCAAALRGLSRTILMCGPLIKEETHRRLHDLVLPLVMGVQQGEVLGSSPYTSSRCRRELYCLLLALLLAPSPRCPLLLPVPCKPSPSASEKIALRSPLSCSEALVTCAALTHPRVPPLQPMGPTCPTPAPVPLLRPHRPSGPHRSILRAPCPQWAPCPQQAPCPSAGPMPSAGPVPSEPWTSTTANLLGLLSRPSVCPPRLLPGPENHRAGSNEDPILAPSGTPPPTIPPDETFGGRVPRPAFVHYDKEEASDVEISLESDSDDSVVIVPEGLPPLPPPPPSGATPPPIAPTGPPTASPPVPAKEEPEELPAAPGPLPPPPPPPPPVPGPVTLPPPQLVPEGTPGGGGPPALEEDLTVININSSDEEEEEEEEEEEEEEEEEEEEEDFEEEEEEEDFEEEEEDEEEYFEEEEEEEEEFEEEFEEEEGELEEEEEEEDEEEEEELEEVEDLEFGTAGGEVEEGAPPPSTLPPALPPPESPPKVQPEPEPEPGLLLEVEEPGTEEERGADTAPTLAPEALPSQGEVEREGESPAAGPPPQELVEEEPSAPPTLLEEETEDGSDKVQPPPETPAEEEMETETEAEALQEKEQDDTAAMLADFIDCPPDDEKPPPPSEPDS

SEQ ID NO: 882 - protein, 159 aa, Homo sapiens
YTMLRGTMTAWRGMRPEVTLACLLLATAGCFADLNEVPQVTVQPASTVQKPGGTVILGCVVEPPRMNVTWRLNGKELNGSDDALGVLITHGTLVITALNNHTVGRYQCVARMPAGAVASVPATVTLASESAPLPPCHGAVPPHLSHPEAPTIHAASCYS

SEQ ID NO: 883 - protein, 121 aa, Homo sapiens
ITPLGLGAADMCAFPWLLLLLLLQEGSQRRLWRWCGSEEVVAVLQESISLPLEIPPDEEVENIIWSSHKSLATVVPGKEGHPATIMVTNPHYQGQILTMLLRSLQQPSASWPRDCSSSCSW

SEQ ID NO: 884 - protein, 74 aa, Homo sapiens
GLVFSRLSPEYYDLARAHLRDEEKSCPCLAQEGPQGDLLTKTQELGRDYRTCLTIVQKLKKMVDKPTQRSVSNA

SEQ ID NO: 885 - protein, 251 aa, Homo sapiens
  misc_feature (1)...(251): Xaa = any amino acid or symbol as shown in the table 8 as set forth in Example 2
SAAGWASPLRPRCGVPRGCSWPSPCTQRCRCPRAGTTACWALGPRACRWPTSCSALDATTQCSSGPRGPAASSHATRGTASSSASTSGTRARLTPSSTSATTGTLCSATTPGCSSDTTRVPTSPTPATWCATWVTSRTRWGSVSSTTPPSPTSLWTRTDRPGMATTSRDXAIFPLSPPAASSLXPLVYQSPTRLTSLAPNMQRVTSPCPWTLRTLXARMCXSWVVGTRPLRQQRTSWVSQTLSICSAAPGS

SEQ ID NO: 886 - protein, 440 aa, Homo sapiens
RAPARQGPGPARLPGMVSKALLRLVSAVNRRRMKLLLGIALLAYVASVWGNFVNMSFLLNRSIQENGELKIESKIEEMVEPLREKIRDLEKSFTQKYPPVKFLSEKDRKRILITGGAGFVGSHLTDKLMMDGHEVTVVDNFFTGRKRNVEHWIGHENFELINHDVVEPLYIEVDQIYHLASPASPPNYMYNPIKTLKTNTIGTLNMLGLAKRVGARLLLASTSEVYGDPEVHPQSEDYWGHVNPIGPRACYDEGKRVAETMCYAYMKQEGVEVRVARIFNTFGPRMHMNDGRVVSNFILQALQGEPLTVYGSGSQTRAFQYVSDLVNGLVALMNSNVSSPVNLGNPEEHTILEFAQLIKNLVGSGSEIQFLSEAQDDPQKRKPDIKKAKLMLGWEPVVPLEEGLNKAIHYFRKELEYQANNQYIPKPKPARIKKGRTRHS

SEQ ID NO: 887 - protein, 523 aa, Homo sapiens
HLFLEFSVTQQEVQFKPESLCKKLFSDHKELEGLMKTLIHPCSQGIVIFSRSWAGDVGFRKEQNVLWDALLIAVNSPVVLYTILIDPNWPGGLEYARNTAHQLKQKLQTVGGYTGKVCIIPRLIHLSSTQSRPGEIPLRYPRSYRLADEEEMEDLLQALVVVSLSSRSLLSDQMGCEFFNLLIMEQSQLLSESLQKTRELFIYCFPGVRKTALAIKIMEKIKDLFHCKPKEILYVCESDSLKDFVTQQTTCQAVTRKTFMQGEFLKIKHIVMDETENFCSKYGNWYMKAKNITHPKAKGTGSENLHHGILWLFLDPFQIHHADVNGLPPPSAQFPRKTITSGIHCALEIAKVMKEEMKRIKENPPSNMSPDTLALFSETAYEEATCAQALPGVCETKTNLTTEQIANYVARKCHSLFQCGYLPKDIAILCRRGEDRGRYRLALLKAMELIETHRPSEVVFSPATGVWGSHIVLDSIQQFSGLERTVVFGLSPECDQSEEFHKLCFASRAIKHLYLLYEKRAAY

SEQ ID NO: 888 - protein, 134 aa, Homo sapiens
PAGIRRSIAKQTGHPGSWETGLWIFRDAAIEFSPEEWSYLDPAQQNLYRDGMLENYRNLVSLGIAVSKPDLITCLEQRNEPWNVKKHETVARHPAVSSHFTQDLLPEHGIKDSFQKVILRRYGSYGIENLQLKK

SEQ ID NO: 889 - protein, 155 aa, Homo sapiens
GARRQAHTMALKRINKELSDLARDPPAQCSAGPVGDDMFHWQATIMGPNDSPYQGGVFFLTIHFPTDYPFKPPKVAFTTRIYHPNINSNGSICLDILRSQWSPALTISKVLLSICSLLCDPNPDDPLVPEIARIYKTDRDKYNRISREWTQKYAM

SEQ ID NO: 890 - protein, 102 aa, Homo sapiens
LVCFFSVLMGPFYPPVSPERSVAQSEAREGRGPRGLPPLSLPRGPFGARAHRVGRPGSSVPHSPPSRGRGRKNPASARQQQRLAGNGAQEGRQRLAASKSTP

SEQ ID NO: 891 - protein, 239 aa, Homo sapiens
  misc_feature (1)...(239): Xaa = any amino acid or symbol as shown in the table 8 as set forth in Example 2
EAWCSWVWDFTRAYSGAPIFLLHMGSAPLPSRAEGKSLARVPNATGLRMAFCLEASLGPDFCCWYQSPETLPPWSPCNAQLVSYCFSKPLKASTSPLSPGQDCGEASQPLLSXLPLSCPTLGCPFPSFPSKGFHGPPSVGSGPARSRLGSSSCFXATTLGKLNVPSTLSPFPRTNHFCAHPWRRDELLAEGQSKCKSWSAGRGVHGFPSPGRVSVSFILSPLTGYGFRAMPRAPLCSPA

SEQ ID NO: 892 - protein, 169 aa, Homo sapiens
  misc_feature (1)...(169): Xaa = any amino acid or symbol as shown in the table 8 as set forth in Example 2
PLTTTPAAPRAPCPPSRLSGQPLTGPTEGSRSRLSPNISEQGEPPLALTVGHPLSTQPGPTVPSELEPIQGPRGXGDCPTPSQSAXGGVLSCTPESHTEFKPPPTGGGRRWARLGLNGATXGREEPLQTRLPAEYPGPGPIDPLQPPPISTASMATAFSDFLLLGRDPA

SEQ ID NO: 893 - protein, 262 aa, Homo sapiens
  misc_feature (1)...(262): Xaa = any amino acid or symbol as shown in the table 8 as set forth in Example 2
FSDLTAHFLFHSGEKPYECKECGKVFRYKSSLTSHHRIHTGEKPYKCNRCGKVFSRSSNLVCHQKIHTGEKPYKCNQCGKVFNQASYLTRHQIIHTGERPYRCSKCGKAFRGCSGLTAHLAIHTEKKSHECKECGKIFTQKSSLTNHHRIHIGEKPYKCTLCSKVFSHNSDLAQHQRVHSXESLQTVYGKTIIMSSSINQHQXVHTKWKSYKXNVCDTGFIKACQITGHHHITVEDESTQMNCVYLGYYSRTIAIEHDRIYT

SEQ ID NO: 894 - protein, 275 aa, Homo sapiens
  misc_feature (1)...(275): Xaa = any amino acid or symbol as shown in the table 8 as set forth in Example 2
RTVTTFLSKDSHGVYCAQGGKIPDHQNPQCNRKQHPVSTILMLDKASFCQLRKRKHNLSVNCINRNPFMSLKNTSWHSSLSVTQRHQQQSKLHFQGSILLHXPSQNILSNIXKCINYCXHCSSVLLSYLFIETESYSVAQAGVQWHDLGLLQLLPLRFKQFSCFSLPSSWDYRSAPSCPANFCILVEMGFCHVGQAGLKLLASSDPPALASQSAGITGVSHYTQPCSPFLKSTGLFSCKVLSNPYHKGRIYLGRMCFLNSTWHLVKSTLFCPLFI

SEQ ID NO: 895 - protein, 156 aa, Homo sapiens
  misc_feature (1)...(156): Xaa = any amino acid or symbol as shown in the table 8 as set forth in Example 2
KRQSEEGVFSCCQGWNESLLLKSKVLEYPXFLHFPSFSFDLYLFNYVFIYLFIYFCSIQSQTQSKAERAYIYIYLYMCCRQNTVNFTTTTTKQLFCHLNIHLRRRNEKRWGCHFLVYAFEARSMFIYFFSLCINENDPEWRLAERSMYWSKHHKSC

SEQ ID NO: 896 - protein, 333 aa, Homo sapiens
AWHEGLVSSPAIGAYLSASYGDSLVVLVATVVALLDICFILVAVPESLPEKMRPVSWGAQISWKQADPFASLKKVGKDSTVLLICITVCLSYLPEAGQYSSFFLYLRQVIGFGTVKIAAFIAMVGILSIVAQTAFLSILMRSLGNKNTVLLGLGFQMLQLAWYGFGSQAWMMWAAGTVAAMSSITFPAISALVSRNAESDQQGVAQGIITGIRGLCNGLGPALYGFIFYMFHVELTELGPKLNSNNVPLQGAVIPGPPFLFGACIVLMSFLAALFIPEYSKASGVQKHSNSSSGSLTNTPERGSDEDIEPLLQDSSIWELSSFEEPGNQCTEL

SEQ ID NO: 897 - protein, 113 aa, Homo sapiens
  misc_feature (1)...(113): Xaa = any amino acid or symbol as shown in the table 8 as set forth in Example 2
TPIRGTDDEHEECTVQEYSAGKNTCLRPGAVAHTCNPCTLGGRGRWITXGSGVQDQPGPTWQNPVFLERRPRALHSSPGLTTQRILWAQGLWVGAGSTGCSRGPRGEGVFREG

SEQ ID NO: 898 - protein, 137 aa, Homo sapiens
  misc_feature (1)...(137): Xaa = any amino acid or symbol as shown in the table 8 as set forth in Example 2
FFFFECGXSFTNSFSVTIHRRIHNGEKSYECSDCGKSFNVLSSVKKHMRTHTGKKPYECNYCGKSFTSNSYLSVHTRMHNRQMXIQXLCGKAFIDLSCLRXHEQTLTRCMNHLLLCNKLPPKILWLQTKTLVISKFL

SEQ ID NO: 899 - protein, 954 aa, Homo sapiens
ALPDGGASVASDRAEGRPAKPSKTAAREKTEGAVAAVGGGPSSFRCCYGCCHEARLGRTSLPRGVIMLTEASLSIWGWGSLGIVLFLITFGPFVIFYLTFYILCFVGGGLVVTLLFGKTNSEKYLEQCEHSFLPPTSPGVPKCLEEMKREARTIKIDRRLTGANIIDEPLQQVIQFSLRDYVQYWYYTLSDDESFLLEIRQTLQNALIQFATRSKEIDWQPYFTTRIVDDFGTHLRVFRKAQQKITEKDDQVKGTAEDLVDTFFEVEVEMEKEVCRDLVCTSPKDEEGFLRDLCEVLLYLLLPPGDFQNKIMRYFVREILARGILLPLINQLSDPDYINQYVIWMIRDSNCNYEAFMNIIKLSDNIGELEAVRDKAAEELQYLRSLDTAGDDINTIKNQINSLLFVKKVCDSRIQRLQSGKEINTVKLAANFGKLCTVPLDSILVDNVALQFFMDYMQQTGGQAHLFFWMTVEGYRVTAQQQLEVLLSRQRDGKHQTNQTKGLLRAAAVGIYEQYLSEKASPRVTVDDYLVAKLADTLNHEDPTPEIFDDIQRKVYELMLRDERFYPSFRQNALYVRMLAELDMLKDPSFRGSDDGDGESFNGSPTGSINLSLDDLSNVSSDDSVQLHAYISDTVYADYDPYAVAGVCNDHGKTYALYAITVHRRNLNSEEMWKTYRRYSDFHDFHMRITEQFESLSSILKLPEKKTFNNMDRDFLEKRKKDLNAYLQLLLAPEMMKASPALAHYVYDFLENKAYSKGKGDFARKMDTFVNPLRNSMRNVSNAVKSLPDSLAEGMTKMSDNMGKMSERLGQDIKQSFFKVPPLIPKTDSDPEHRRVSAQLDDNVDDNIPLRVMLLLMDEVFDLKERNQWLRRNIKNLLQQLIRATYGDTINRKIVDHVDWMTSPEQVADSVKRFRDAFWPNGILAEAVPCRDKSIRMRTRVAGKTKLLAIMPGE

SEQ ID NO: 900 - protein, 95 aa, Homo sapiens
MGSLLCSCSQRECISIHVGQAGVQIGNACWELYCLEHGIQPDGQMPSDKPIGGGDDSFNTFFSETGAGKHVPRAVFVDLEPTVVGRCLGTGWQLS

SEQ ID NO: 901 - protein, 109 aa, Homo sapiens
  misc_feature (1)...(109): Xaa = any amino acid or symbol as shown in the table 8 as set forth in Example 2
GLDSFSATETRRTHTNTEPHSQSQEPSNGEPQKEEPAAESRDPTPGQQTEEDQDTAEIPVRDMEGDLQELASVKHRGXILDLGSSVKVKIIPKEEHCKMPEAGEEQPQV

SEQ ID NO: 902 - protein, 295 aa, Homo sapiens
MSPTREAPYLTLYCTLSAYGSAWPMVGLSKYLQKEKFLNEHREDFSNAFGLGEDKGGNFLRLSPPSSGRQGHHTRRAEALLGGAAGSNPGKATSERAHLLSPGGAALVSEESNADKRVENWPLMQSPWPTLSISTLYLLFVWLGPKWMKDREPFQMRLVLIIYNFGMVLLNLFIFRELFMGSYNAGYSYICQSVDYSNNVHEVRIQFHVTIGHTALSLYTDCPFPKWMHWALIAYAISFIFLFLNFYIRTYKEPKKPKAGKTAMNGISANGVSKSEKQLMIENGKKQKNGKAKGD

SEQ ID NO: 903 - protein, 109 aa, Homo sapiens
GPASNRALGFVVLLETRMVSAVSDPPTSTTGSTMCECISIHVGQAGVQMGNACWELYCLEHDIQPSGTMPSHKALGSSDNSFNTFFRETQPGRHVPGLSVDLEPAVIAQ

SEQ ID NO: 904 - protein, 138 aa, Homo sapiens
EKPYECSDCGKSFIKKSQLHVHQRIHTGENPFICSECGKVFTHKTNLIIHQKIHTGERPYICTVCGKAFTDRSNLIKHQKIHTGEKPYKCSDCGKSFTWKSRLRIHQKCHTGERHYECSECGKAFIQKSTLSMHQRIH

SEQ ID NO: 905 - protein, 131 aa, Homo sapiens
MPLEVVVELQIRAISCPGVFLPGKQDVYLGVYLMNQYLETNSFPSAFPIMIQESMRFEKVFESAVDPGAVVDLLENGDPSKAETEAAGHREEYIGTGRTTRSLAGAVGREPGLPSGPTPGENHLPAGSPIC

SEQ ID NO: 906 - protein, 351 aa, Homo sapiens
AEWDAADKAHVGPGRSPRQPLPHVGRRRAAHTTGRGRRTAGCAPAPARTLCILSILGPWCVLPHLPTLCLGQAQAASCSQGAHGCFAGCSCTGTSASHPVCCKCPLHPVCTLADVHGCITSGFSVISLPQTCAPWTSWRKWSLSDSWQVDACPESCCEPPCCATSCCAPAPCLTLVCTPVSCVSSPCCQAACEPSPCQSGCTSSCTPSCCQQSSCQPACCTSSPCQQACCVPVCCKPVCCVPVCCKPVCCKPICCVPVCSGASSSCCQQSSRQPACCTTSCCRPSSSVSLLCRPVCRSTCCVPIPSCCAPASTCQPSCCRPASCVSLLCRPTCSRLSSACCGLSSGQKSSC

SEQ ID NO: 907 - protein, 159 aa, Homo sapiens
RIPGRRFRAAFVLGSANVASSVRLRCSFPLSLGGPSGPAAASVALGPAGPGRSLGRTPDTGDWEMDSVSFEDVAVAFTQEEWALLDPSQKNLYRDVMQEIFRNLASVGNKSEDQNIQDDFKNPGRNLSSHVVERLFEIKEGSQYGETFSQDSNLNLNKI

SEQ ID NO: 908 - protein, 97 aa, Homo sapiens
  misc_feature (1)...(97): Xaa = any amino acid or symbol as shown in the table 8 as set forth in Example 2
FFLRRSFAVVAQAGVQWHDLNSPQPPPPGFKQFSCLSLPSSXDYRRMPPRPANFVFLVEMGFLHVGQAGLKLPTSGDPPASASQSAGITGVSHRAQP

SEQ ID NO: 909 - protein, 341 aa, Homo sapiens
RYFRSLAEGVRAAPRRREPRTMSVGFIGAGQLAYALARGFTAAGILSAHKIIASSPEMNLPTVSALRKMGVNLTRSNKETVKHSDVLFLAVKPHIIPFILDEIGADVQARHIVVSCAAGVTISSVEKKLMAFQPAPKVIRCMTNTPVVVQEGATVYATGTHALVEDGQLLEQLMSSVGFCTEVEEDLIDAVTGLSGSGPAYAFMALDALADGGVKMGLPRRLAIQLGAQALLGAAKMLLDSEQHPCQLKDNVCSPGGATIHALHFLESGGFRSLLINAVEASCIRTRELQSMADQEKISPAALKKTLLDRVKLESPTVSTLTPSSPGKLLTRSLALGGKKD

SEQ ID NO: 910 - protein, 81 aa, Homo sapiens
QLCSCLRPDRPPLPARSAQSPMAAALRAPTQVFVAFEDVAIYFSQEEWELLDEMQRLLYRDVMLENFAVMASLGIIECFQE

SEQ ID NO: 911 - protein, 142 aa, Homo sapiens
QDIAAWQSLTQVLTPESWRKANIMTEPQKSQERYKGIYVKEKLYRRARHDESLNWTSCDHHESQECKGEDPGRHPNCGKNLGMKSTVEQHHVVHVLPQPFTCNNCGVAFADDTDPRAHPSTHLGEKSYKCDQYGKILSQSLY

SEQ ID NO: 912 - protein, 138 aa, Homo sapiens
PIGTLFSVAEFLVEHQRSHTGEKPYECNDCGKVFSQSTHLIQHQRIHTGEKPYKCSECGKAFHNSSRLIHHQRLHHGEKPYRCSDCKKAFSQSTYLIQHRRIHTGEKPYKCSECGKAFRHSSNMCQHQRIHLREDFSM

SEQ ID NO: 913 - protein, 186 aa, Homo sapiens
SSCQAVCCDPSPCEPTCSESSICQPATCVALVCEPVCLRPVCCVQSSCEPPSVPSTCQEPSCCVSSICQPICSEPSPCSPAVCVSSPCQPTCYVVKRCRSVCPEPVSCPSTSCRPLSCSPGSLHLPSRPTCPRTFYIPSSSKRPCSATISYRPVSRPICRPICSGLLTYRQPYMTSISYRPACYRP

SEQ ID NO: 914 - protein, 342 aa, Homo sapiens
  misc_feature (1)...(342): Xaa = any amino acid or symbol as shown in the table 8 as set forth in Example 2
FFFLSQYISVYYNLPRLRDLARAAKTDSDRPSPPGACSQPGPKRKQASEGTAECRVLATELQECALAPTRATVLPPPGLPGLRQQPPAHGGSPPPGAARPSHRSAGPQALHLPGPPPAAAAALSPGAGGLLHSSWXEAGPPPQKAPGGGTPSPPGPVAQVDTTHDSQHPLAGRNPRAPQRSPARPPLEAAGKAERGRQSSRTGVASGHGTXDQWMWCKGHGHPAVRGPGIGAAEAGAEGGQGGQDTGRAHGQPPGVHTAVLPHGSAAPESRWAPAPPAGASTLGVGPXPDGTPGSAVPGPVPPAPSVLPQSPGSRPPVKRPVQVRQARGPGPPPTWVLPGVP

SEQ ID NO: 915 - protein, 357 aa, Homo sapiens
MVQVIRKDAPTPRTREPSLSDKGICPKPQEALKFFCEVDEEAICVVCREFRSHKQHSVVPLEEVVQEYKELLESRLRVLKKELEDCEVFRSTEKKESKELLRILLTNAHPHNLAVKLEHTGLDAHLDLLLSTHTFGYPKEDQRLWHAVAEATGLKAERTLFIDDSEAILDAAAQFGDAMKEKPAVEVRLDKWLWAARFYKTRALAREMIEGGKVHYNGQRSKPSKIVELNATLTLRQGNDERTVIVKAITEQRRPASTDRNRKPQYLEIIDIWDLSTSSVKIDVLVDRNARLISVLLKFGVHTVEIQAQSTGIIFQSRHPFMHPVTSPGTCRPSLNCLTGSPGTELECINSRVITGY

SEQ ID NO: 916 - protein, 144 aa, Homo sapiens
VLSCSPAPVAGPRGANPGEPRSGRDMDCVIFEEVAVNFTPEEWALLDHAQRSLYRDVMLETCRNLASLDCYIYVRTSGSSSQRDVFGNGISNDEEIVKFTGSDSWSIFGENWRFDNTGDQHQIPQRHLRSQLGRLCESMKVIMR

SEQ ID NO: 917 - protein, 234 aa, Homo sapiens
PAPLAEGAFLAEASLLKLSPATPTSEGPKVVSVQLGDGTRLKGTVLPVATIQNASTAMLMAASVARKAVVLPGGTATSPKMIAKNVLGLVPQALPKADGRAGLGTGGQKVNGASVVMVQPSKTATGPSTGGGTVISRTQSSLVEAFNKILNSKNLLPAYRPNLSPPAEAGLALPPTGYRCLECGDAFSLEKSLARHYDRRSMRIEVTCNHCARRLVFFNKCSLLLHAREHKDKG

SEQ ID NO: 918 - protein, 393 aa, Homo sapiens
  misc_feature (1)...(393): Xaa = any amino acid or symbol as shown in the table 8 as set forth in Example 2
TGQGSGPMRAGSQSHQILSSPPSRMHAKDTPFPTHLIGAPKPLACCVDGGEARPAVLWPGEKKIKRRPCPWGRPLSGPPFPPPNLPGPRTPLPAPTPLEVSRPFLCHLVGQMAXWASAWGIEXGSPXPPEPNPGPRCKQHPSRALPQYPQGIHTPPLLPQPRTDRLPGPEPNRPSASETHGGPHTPYILPHXGSPGPTGASGKPPKLATALGRALCPPHHRPRSRVLVGALHPNPRSPWPPIFLGPIGACFSPAGWTPXRAVPRGSPGGSRLGAYVVVSGPRLQPPAPTPELYPLSRMSAIFHSRWMSGEVVGRGPAXGSGIRTMSSEEKCTGACXATGVPERAEEGAATEVGSSAPPPRPRPASAGFRFVPGFFLFFSVCVRMVRPLPSHRG

SEQ ID NO: 919 - protein, 61 aa, Homo sapiens
MHGLFGQCFQEALGFLLLPRFPQSSQMLKFLKVDVTGSLTTNKLAVTVFETQYLWQLTSNQ

SEQ ID NO: 920 - protein, 74 aa, Homo sapiens; identical to SEQ ID NO: 884

SEQ ID NO: 921 - protein, 115 aa, Homo sapiens
  misc_feature (1)...(115): Xaa = any amino acid or symbol as shown in the table 8 as set forth in Example 2
FFQVFIFLFLIFFKTEFHSCCPGAVQWHDLDSLQPPPPRFKGFSCLSLPSSWDYRHAPAHPANFVFLVETGFLHVGQASLELPTSGDTPASASQSAGITGVSHHAXPRASGRRCW

SEQ ID NO: 922 - protein, 136 aa, Homo sapiens
HASGLSEASHSKKTVKKVVVVEQNGSFQVKIPKNFVCEHCFGAFRSSYHLKRHILIHTGEKPFECDICDMRFIQKYHLERHKRVHSGEKPYQCERCHQVRLIPATIPHTHFSFPKNQGHPPLLPDKRATSVTRHNS

SEQ ID NO: 923 - protein, 238 aa, Homo sapiens
  misc_feature (1)...(238): Xaa = any amino acid or symbol as shown in the table 8 as set forth in Example 2
REAEGWVGWKDCPARLQLLGPTPHVGPVARSAAALSLEPWDLDHSPPXSAEGCCSSPDVYTGADWRPSLGYQGNSSWAHSGPGQLPHAMPAAGGAGGERLTGGRRALVHHCSRPRPRPSNEPTVAHGATTVAASARAAADRPAPXGRQGKGRRPAPXERGPPQHSGGRGTGVRPSAAATGNQGRVVACPPTGSVLEPRSLRRPPEAAVHLAPALTTGRRTRLGESRGSADPAVTPASG

SEQ ID NO: 924 - protein, 157 aa, Homo sapiens
PAPAARSRELLKELRNGQDMDTVVFEDVVVDFTLEEWALLNPAQRKLYRDVMLETFKHLASVDNEAQLKASGSISQQDTSGEKLSLKQKIEKFTRKNIWASLLGKNWEEHSVKDKHNTKERHLSRNPRVERPCKSSKGNKRGRTFRKTRNCNRHLRR

What is claimed is:

1. An isolated polynucleotide comprising a nucleotide sequence selected from the group consisting of SEQ ID NO: 1-244.

2. An isolated polynucleotide encoding a polypeptide with biological activity, wherein said polynucleotide hybridizes to the polynucleotide of claim 1 under stringent hybridization conditions.

3. An isolated polynucleotide encoding a polypeptide with biological activity, wherein said polynucleotide has greater than about 99% sequence identity with the polynucleotide of claim 1.

4. The polynucleotide of claim 1 wherein said polynucleotide is DNA.

5. An isolated polynucleotide of claim 1 wherein said polynucleotide comprises the complementary sequences.

6. A vector comprising the polynucleotide of claim 1.

7. An expression vector comprising the polynucleotide of claim 1.

8. A host cell genetically engineered to comprise the polynucleotide of claim 1.

9. A host cell genetically engineered to comprise the polynucleotide of claim 1 operatively associated with a regulatory sequence that modulates expression of the polynucleotide in the host cell.

10. An isolated polypeptide, wherein the polypeptide is selected from the group consisting of
(a) a polypeptide encoded by any one of the polynucleotides of claim 1; and
(b) a polypeptide encoded by a polynucleotide hybridizing under stringent conditions with any one of SEQ ID NO: 1-244.

11. A composition comprising the polypeptide of claim 10 and a carrier.

12. An antibody directed against the polypeptide of claim 10.

13. A method for detecting the polynucleotide of claim 1 in a sample, comprising:
a) contacting the sample with a compound that binds to and forms a complex with the polynucleotide of claim 1 for a period sufficient to form the complex; and
b) detecting the complex, so that if a complex is detected, the polynucleotide of claim 1 is detected.

14. A method for detecting the polynucleotide of claim 1 in a sample, comprising:
a) contacting the sample under stringent hybridization conditions with nucleic acid primers that anneal to the polynucleotide of claim 1 under such conditions;
b) amplifying a product comprising at least a portion of the polynucleotide of claim 1; and
c) detecting said product and thereby the polynucleotide of claim 1 in the sample.

15. The method of claim 14, wherein the polynucleotide is an RNA molecule and the method further comprises reverse transcribing an annealed RNA molecule into a cDNA polynucleotide.

16. A method for detecting the polypeptide of claim 10 in a sample, comprising:
a) contacting the sample with a compound that binds to and forms a complex with the polypeptide under conditions and for a period sufficient to form the complex; and
b) detecting formation of the complex, so that if a complex formation is detected, the polypeptide of claim 10 is detected.

17. A method for identifying a compound that binds to the polypeptide of claim 10, comprising:
a) contacting the compound with the polypeptide of claim 10 under conditions sufficient to form a polypeptide/compound complex; and
b) detecting the complex, so that if the polypeptide/compound complex is detected, a compound that binds to the polypeptide of claim 10 is identified.

18. A method for identifying a compound that binds to the polypeptide of claim 10, comprising:
a) contacting the compound with the polypeptide of claim 10, in a cell, under conditions sufficient to form a polypeptide/compound complex, wherein the complex drives expression of a reporter gene sequence in the cell; and
b) detecting the complex by detecting reporter gene sequence expression, so that if the polypeptide/compound complex is detected, a compound that binds to the polypeptide of claim 10 is identified.

19. A method of producing the polypeptide of claim 10, comprising,
a) culturing a host cell comprising a polynucleotide sequence selected from the group consisting of any of the polynucleotides from SEQ ID NO: 1-244, under conditions sufficient to express the polypeptide in said cell; and
b) isolating the polypeptide from the cell culture or cells of step (a).

20. An isolated polypeptide comprising an amino acid sequence selected from the group consisting of any one of the polypeptides SEQ ID NO: 245-488.

21. The polypeptide of claim 20 wherein the polypeptide is provided on a polypeptide array.

22. A collection of polynucleotides, wherein the collection comprising of at least one of SEQ ID NO: 1-244.

23. The collection of claim 22, wherein the collection is provided on a nucleic acid array.

24. The collection of claim 23, wherein the array detects full-matches to any one of the polynucleotides in the collection.

25. The collection of claim 23, wherein the array detects mismatches to any one of the polynucleotides in the collection.

26. The collection of claim 22, wherein the collection is provided in a computer-readable format.
